(19) United States
(12) Patent Application Publication
(10) Pub. No.: US 2022/0170018 A1
(43) Pub. Date: Jun. 2, 2022

(54) CONTROL OF INSECT PESTS USING RNA MOLECULES

(71) Applicant: DEVGEN NV, Gent - Zwijnaarde (BE)

(72) Inventors: Lien DE SCHRIJVER, GENT- ZWIJNAARDE (BE); Kaat CAPPELLE, GENT-ZWIJNAARDE (BE); Lies DEGRAVE, GENT-ZWIJNAARDE (BE); Myriam BEGHYN, GENT-ZWIJNAARDE (BE); Yann NAUDET, GENT-ZWIJNAARDE (BE)

(73) Assignee: DEVGEN NV, GENT- ZWIJNAARDE (BE)

(21) Appl. No.: 17/593,594

(22) PCT Filed: Mar. 13, 2021
(86) PCT No.: PCT/EP2020/056983

§ 371 Date: Sep. 21, 2021

(30) Foreign Application Priority Data
Mar. 21, 2019 (EP) 19164378.2

(51) Int. Cl. C12N 15/113; A01N 63/60; C12N 15/82; A01N 63/50

(52) U.S. Cl. CPC C12N 15/113; A01N 63/60; C12N 2310/14; A01N 63/50; C12N 15/8286; C12N 15/8218

(57) ABSTRACT

Disclosed are double stranded RNA molecules that are toxic to flea beetles, particularly the flea beetle species Psylliodes chrysocephala, Phyllotreta nemorum, Phyllotreta striolata, Phyllotreta armoraciae, Phyllotreta atra and Phyllotreta cruciferae. In particular, interfering RNA molecules capable of interfering with pest target genes and that are toxic to the target pest are provided. Further, methods of making and using the interfering RNA, for example in transgenic plants or as the active ingredient in a composition, to confer protection from insect damage are disclosed.

[0001] The invention relates generally to the control of pests that cause damage to crop plants by their feeding activities, and more particularly to the control of beetles by compositions comprising interfering RNA molecules. The invention further relates to the compositions and to methods of using such compositions comprising the interfering RNA molecules.

### BACKGROUND

[0002] Flea beetles are members of the leaf beetle family Chrysomelidae, sub family Galerucinae, in the tribe Alticini. Adult flea beetles feed externally on plants, eating the surface of leaves, stems, and petals. The flea beetles Psylliodes chrysocephala, Phyllotreta cruciferae, Phyllotreta nemorum, and Phyllotreta striolata (Coleoptera: Chrysomelidae) are significant pests of crops in the Brassicaceae family, including Brussel sprouts, kale, broccoli, cauliflower, and canola (Brassica rapa and Brassica napus). Flea beetles are primarily controlled by application of chemical insecticides, however many effective insecticides, such as parathion-ethyl, parathion-methyl and gamma-HCH, are no longer allowed in many areas of the world due to environmental, human safety, and regulatory issues. Additionally, other chemical insecticides have been shown not to be sufficiently efficacious against at least some species of flea beetle (Andersen et al., 2006, J Econ Entomol, 99(3): 803-810; Tansey et al., 2009, J Appl Entomol, 133: 201-209). Finally, flea beetle resistance to the remaining effective chemical insecticides is a significant concern. Therefore, novel compositions for control of flea beetles are urgently needed.

[0003] RNA interference (RNAi) occurs when an organism recognizes double-stranded RNA (dsRNA) molecules and hydrolyzes them. The resulting hydrolysis products are small RNA fragments of about 19-24 nucleotides in length, called small interfering RNAs (siRNAs). The siRNAs then diffuse or are carried throughout the organism, including across cellular membranes, where they hybridize to mRNAs (or other RNAs) and cause hydrolysis of the RNA. Interfering RNAs are recognized by the RNA interference silencing complex (RISC) into which an effector strand (or “guide strand”) of the RNA is loaded. This guide strand acts as a template for the recognition and destruction of the duplex sequences. This process is repeated each time the siRNA hybridizes to its complementary-RNA target, effectively preventing those mRNAs from being translated, and thus “silencing” the expression of specific genes from which the mRNAs were transcribed.

[0004] RNAi has been found to be useful for insect control of certain insect pests. RNAi strategies typically employ a synthesized, non-naturally occurring “interfering RNA”, or “interfering RNA molecule” which typically comprises at least a RNA fragment against a target gene, a spacer sequence, and a second RNA fragment which is complementary to the first, so that a double-stranded RNA structure can be formed. This non-natural double-stranded RNA molecule takes advantage of the native RNAi pathways in the insect to trigger down-regulation of target genes that may lead to the cessation of feeding and/or growth and may result in the death of the insect pest.

[0005] Although it is known in the literature that RNAi strategies focused on target genes can lead to an insecticidal effect in Diabrotica species, it is also known that not every target sequence is successful, and that an insecticidal effect cannot be predicted. The overwhelming majority of sequences complementary to corn rootworm DNAs are not lethal in species of corn rootworm when used as dsRNA or siRNA. For example, Baum et al. ((2007) Nature Biotechnology 25:1322-1326), describe the effects of inhibiting several WCR gene targets by RNAi. The authors report that of 290 dsRNAs tested, only 125 showed significant larval mortality and/or stunting at the dsRNA concentration of 5.2 ng/cm². Additionally, the dosage or quantity of a given dsRNA molecule required to confer significant insecticidal activity needs to be considered for the dsRNA molecule to be of commercial value for crop protection.

[0006] There is an ongoing need for compositions containing insecticidal active ingredients, and for methods of using such compositions, for instance for use in crop protection or insect-mediated disease control. Novel compositions are required to overcome the problem of resistance to existing insecticides and/or to help mitigate the development of resistance to existing transgenic plant approaches. Ideally such compositions have a high toxicity and are effective when ingested orally by the target pest and have applicability for use against both the larval and adult stages of the pest insect. Thus any invention which provided compositions in which any of these properties was enhanced would represent a step forward in the art.

### SUMMARY

[0007] The needs outlined above are met by the invention which, in various embodiments, provides new methods of controlling economically important insect pests. The invention in part comprises a method of inhibiting expression of one or more target genes and proteins in Coleopteran insect pests. Specifically, the invention comprises methods of modulating expression of one or more target genes in a species of insect that causes cessation of feeding, growth, development and reproduction, and eventually results in the death of the insect, where the insect is a flea beetle species of the Alticini tribe. In some embodiments, the insect is a species of a genus selected from the group consisting of the genera Altica, Anthobiodes, Aphthona, Aphthonaltica, Aphthonoides, Apteopeda, Argopistes, Argopus, Arrhenocoela, Batophila, Blepharida, Chaetocnema, Clitea, Crepidodera, Derocrepis, Dibolia, Disonycha, Epitrix, Hermipyxis, Hermaeophaga, Hespera, Hippuriphila, Horaia, Hyphasis, Lipromima, Liprus, Longitarsus, Luperomorpha, Lythraria, Manobia, Mantura, Meishania, Minota, Mniophila, Neicrepidodera, Nonarthra, Novofoudrasia, Ochrosis, Oedionychis, Oglobinia, Omeisphaera, Ophrida, Orestia, Paragopus, Pentamesa, Philopona, Phygasia, Phyllotreta, Podagrica, Podagricomela, Podontia, Pseudodera, Psylliodes, Sangariola, Sinaltica, Sphaeroderma, Systena, Trachyaphthona, Xuthea, and Zipangia. In embodiments, the insect is a species selected from the group consisting of Altica ambiens (alder flea beetle), Altica canadensis (prairie flea beetle), Altica chalybaea (grape flea beetle), Altica prasina (poplar flea beetle), Altica rosae (rose flea beetle), Altica sylvia (blueberry flea beetle), Altica ulmi (elm flea beetle), Chaetocnema pulicaria (corn flea beetle), Chaetocnema conofinis (sweet potato flea beetle), Epitrix cucumeris (potato flea beetle), Systena blanda (palestripped flea beetle), and Systena frontalis (redheaded flea beetle). In embodiments, the insect is a species selected from the group consisting of Phyllotreta armoraciae (horseradish flea beetle), Phyllotreta cruciferae (canola flea beetle), Phyllotreta pusilla (western black flea beetle), Phyllotreta nemorum (striped turnip flea beetle), Phyllotreta atra (turnip flea beetle), Phyllotreta robusta (garden flea beetle), Phyllotreta striolata (striped flea beetle), Phyllotreta undulata, Psylliodes chrysocephala, and Psylliodes punctulata (hop flea beetle), and related species. The method comprises introduction of an interfering RNA molecule comprising a double-stranded RNA (dsRNA) or its modified forms such as small interfering RNA (siRNA) sequences, into cells or into the extracellular environment, such as the midgut, within a pest insect body wherein the dsRNA or siRNA enters the cells and inhibits expression of at least one or more target genes and wherein inhibition of the one or more target genes exerts a deleterious effect upon the pest insect. The interfering RNA molecule is non-naturally occurring. It is specifically contemplated that the methods and compositions of the invention will be useful in limiting or eliminating pest insect infestation in or on any plant by providing one or more compositions comprising interfering RNA molecules comprising dsRNA or siRNA molecules in the diet of the pest. The invention also provides interfering RNA molecules that when delivered to an insect pest inhibits, through a toxic effect, the ability of the insect pest to survive, grow, feed and/or reproduce, or to limit pest related damage or loss to crop plants. Such delivery may be through production of the interfering RNA in a transgenic plant, for example canola, or by topically applying a composition comprising the interfering RNA to a plant or plant seed, such as a canola plant or canola seed. Delivery may further be through contacting the insect with the interfering RNA, such as when the insect feeds on plant material comprising the interfering RNA, either because the plant material is expressing the interfering RNA through a transgenic approach, or because the plant material is coated with a composition comprising the interfering RNA. The interfering RNA may also be provided in an artificial insect diet which the insect then contacts by feeding. The interfering RNA molecule comprises a nucleotide sequence that is complementary to a nucleotide sequence of a mRNA transcribable from a target gene or a portion of a nucleotide sequence of a mRNA transcribable from a target gene of the pest insect and therefore inhibits expression of the target gene, which causes cessation of feeding, growth, development, reproduction and eventually results in death of the pest insect. The invention is further drawn to nucleic acid constructs, nucleic acid molecules and recombinant vectors that comprise or encode at least a fragment of one strand of an interfering RNA molecule of the invention. The invention also provides chimeric nucleic acid molecules comprising an antisense strand of a dsRNA of the interfering RNA operably associated with a plant microRNA precursor molecule. The invention also provides artificial plant microRNA precursors comprising an antisense strand of a dsRNA of an interfering RNA of the invention.

[0008] The invention further provides an interfering ribonucleic acid (RNA) molecule wherein the RNA comprises at least one dsRNA wherein the dsRNA is a region of double-stranded RNA comprising annealed complementary strands, one strand of which comprises a sequence of at least 19 contiguous nucleotides which is at least partially complementary to a target nucleotide sequence within a flea beetle target gene, and (i) is at least 85% identical to at least a 19 contiguous nucleotide fragment of SEQ ID NO: 253-378 or SEQ ID NO: 616-701, or the complement thereof; or (ii) comprises at least a 19 contiguous nucleotide fragment of SEQ ID NO: 409-612, or the complement thereof; or (iii) comprises at least a 19 contiguous nucleotide fragment of a nucleotide sequence encoding an amino acid sequence encoded by SEQ ID NO: 409-612, or the complement thereof, wherein the interfering RNA molecule has insecticidal activity on a Coleopteran plant pest. In some embodiments, the interfering molecule may comprise at least two dsRNAs, wherein each dsRNA comprises a sequence of nucleotides which is at least partially complementary to a target nucleotide sequence within the target gene. In further embodiments, each of the dsRNAs may comprise a different sequence of nucleotides which is complementary to a different target nucleotide sequence within the target gene.

[0009] The invention further provides compositions comprising one or more interfering RNA molecules comprising two or more of dsRNA molecules, wherein the two or more RNA molecules each comprise a different antisense strand, or comprising two or more nucleic acid constructs or nucleic acid molecules or artificial plant microRNA precursors of the invention.

[0010] The invention further provides insecticidal compositions for inhibiting the expression of a Coleopteran insect gene that comprises a dsRNA of the invention and an agriculturally acceptable carrier. In one embodiment, inhibition of the expression of a flea beetle gene described here leads to cessation of feeding and growth and ultimately results in the death of the flea beetle.

[0011] The invention is further drawn to transgenic plants which produce one or more interfering RNA molecules of the invention that are self-protected from insect feeding damage and to methods of using the plants alone or in combination with other insect control strategies to confer maximal insect control capabilities. Plants and/or plant parts producing one or more interfering RNA molecules of the invention or treated with a composition comprising one or more interfering RNA molecules of the invention are highly resistant to insect pest infestation. For example, economically important Coleopteran pests can be controlled by a plant that produces an interfering RNA molecule of the invention or by a plant or plant seed that is treated with a composition comprising an interfering RNA molecule of the invention.

[0012] The invention also provides a method of controlling a Coleopteran insect plant pest comprising contacting the Coleopteran insect with a nucleic acid molecule that is or is capable of producing an interfering RNA of the invention for inhibiting expression of a gene in the Coleopteran insect thereby controlling the Coleopteran insect.

[0013] In other aspects, the invention provides a method of reducing a flea beetle population on a transgenic plant expressing a second insecticidal agent, for example an insecticidal protein, in addition to an interfering RNA of the invention capable of inhibiting expression of an target gene in a flea beetle, thereby reducing the flea beetle population. The second insecticidal agent may be an insecticidal protein derived from Bacillus thuringiensis. A B. thuringiensis insecticidal protein can be any of a number of insecticidal proteins including but not limited to a Cry1 protein, a Cry3 protein, a Cry7 protein, a Cry8 protein, a Cry11 protein, a Cry22 protein, a Cry 23 protein, a Cry 36 protein, a Cry37 protein, a Cry34 protein together with a Cry35 protein, a binary insecticidal protein CryET33 and CryET34, a binary insecticidal protein TIC100 and TIC101, a binary insecticidal protein PS149B1, a VIP, a TIC900 or related protein, a TIC901, TIC1201, TIC407, TIC417, a modified Cry3A protein, or hybrid proteins or chimeras made from any of the preceding insecticidal proteins. The insecticidal protein may be any other insecticidal protein derived from B. thuringiensis known in the art to be insecticidal (see for example, Palma et al., 2014, Toxins 6: 3296-3325, and references within; Berry and Crickmore, 2017, J of Invertebrate Pathology 142: 16-22, and reference within).

[0014] In other embodiments, the second insecticidal agent may be derived from sources other than B. thuringiensis. The second insecticidal agent can be an agent selected from the group comprising a patatin, a protease, a protease inhibitor, a urease, an alpha-amylase inhibitor, a pore-forming protein, a chitinase, a lectin, an engineered antibody or antibody fragment, a Bacillus cereus insecticidal protein, a Xenorhabdus spp. (such as X. nematophila or X. bovienii) insecticidal protein, a Photorhabdus spp. (such as P. luminescens or P. asymobiotica) insecticidal protein, a Brevibacillus laterosporous insecticidal protein, a Lysinibacillus sphearicus insecticidal protein, a Chromobacterium spp. insecticidal protein, a Yersinia entomophaga insecticidal protein, a Paenibacillus popiliae insecticidal protein, a Clostridium spp. (such as C. bifermentans) insecticidal protein, and a lignin. In other embodiments, the second agent may be at least one insecticidal protein derived from an insecticidal toxin complex (Tc) from Photorhabdus, Xenorhabus, Serratia, or Yersinia. In other embodiments, the insecticidal protein may be an ADP-ribosyltransferase derived from an insecticidal bacteria, such as Photorhabdus spp. In other embodiments, the insecticidal protein may be a VIP protein, such as VIP1 or VIP2 from B. cereus. In still other embodiments, the insecticidal protein may be a binary toxin derived from an insecticidal bacteria, such as ISP1A and ISP2A from B. laterosporous or BinA and BinB from L. sphaericus. In still other embodiments, the insecticidal protein may be engineered or may be a hybrid or chimera of any of the preceding insecticidal proteins.

[0015] In other aspects, the invention provides a method of reducing resistance development in a flea beetle population to an interfering RNA of the invention, the method comprising expressing in a transgenic plant fed upon by the flea beetle population an interfering RNA of the invention that is capable of inhibiting expression of a target gene in a larval and adult flea beetle, thereby reducing resistance development in the flea beetle population compared to a flea beetle population exposed to an interfering RNA capable of inhibiting expression of a flea beetle gene described herein in only the larval stage or adult stage of a flea beetle.

[0016] In other aspects, the invention provides a method of reducing the level of a target RNA transcribable from a flea beetle gene described herein in a flea beetle comprising contacting the flea beetle with a composition comprising an interfering RNA molecule of the invention, wherein the interfering RNA molecule reduces the level of the target RNA in a cell of the flea beetle.

[0017] In still other aspects, the invention provides a method of conferring flea beetle tolerance or Coleopteran plant pest tolerance to a plant, or part thereof, comprising introducing into the plant, or part thereof, an interfering RNA molecule, a dsRNA molecule, a nucleic acid construct, a chimeric nucleic acid molecule, an artificial plant microRNA precursor molecule and/or a composition of the invention, thereby conferring to the plant or part thereof tolerance to the flea beetle or Coleopteran plant pest.

[0018] In further aspects, the invention provides a method of reducing damage to the plant fed upon by a flea beetle, comprising introducing into cells of the plant an interfering RNA molecule, a dsRNA, a nucleic acid molecule, a nucleic acid construct, a chimeric nucleic acid molecule, an artificial plant microRNA precursor molecule and/or a composition of the invention, thereby reducing damage to the plant fed upon by a flea beetle.

[0019] In other aspects, the invention provides a method of producing a transgenic plant cell having toxicity to a Coleopteran insect, comprising introducing into a plant cell an interfering RNA molecule, a dsRNA, a nucleic acid molecule, a nucleic acid construct, a chimeric nucleic acid molecule, an artificial plant microRNA precursor molecule and/or a composition of the invention, thereby producing the transgenic plant cell having toxicity to the Coleopteran insect compared to a control plant cell.

[0020] In further aspects, the invention provides a method of producing a transgenic plant having enhanced tolerance to Coleopteran insect feeding damage, comprising introducing into a plant an interfering RNA molecule, a dsRNA, a nucleic acid molecule, a nucleic acid construct, a chimeric nucleic acid molecule, an artificial plant microRNA precursor molecule and/or a composition of the invention, thereby producing a transgenic plant having enhanced tolerance to Coleopteran insect feeding damage compared to a control plant.

[0021] In other aspects, the invention provides a method of enhancing control of a Coleopteran insect population comprising providing a transgenic plant or transgenic seed of the invention and applying to the transgenic plant or the transgenic seed a chemical pesticide that is insecticidal to a Coleopteran insect, thereby enhancing control of the Coleopteran insect population.

[0022] In other aspects, the invention provides a method of providing a canola grower with a means of controlling a Coleopteran insect pest population below an economic threshold in a canola crop comprising (a) selling or providing to the grower transgenic canola seed comprising a dsRNA, a nucleic acid molecule, a nucleic acid construct, a chimeric nucleic acid molecule, an artificial plant microRNA precursor molecule and/or a composition of the invention; and (b) advertising to the grower that the transgenic canola seed produces transgenic canola plants capable of controlling a Coleopteran insect pest population.

[0023] In another aspect, the invention provides a method of identifying an orthologous target gene for using as a RNAi strategy for the control of a different Coleopteran plant pest, said method comprising the steps of: a) producing a primer pair that will amplify a target selected from the group comprising or consisting of SEQ ID NO: 1-102, or a complement thereof; b) amplifying an orthologous target gene from a nucleic acid sample of the plant pest using the primer pair of step a); c) identifying a sequence of an orthologous target gene; d) producing an interfering RNA molecule, wherein the RNA comprises at least one dsRNA, wherein the dsRNA is a region of double-stranded RNA comprising annealed complementary strands, one strand of which comprises a sequence of at least 19 contiguous nucleotides which is at least partially complementary to the orthologous target nucleotide sequence within the target gene; and e) determining if the interfering RNA molecule of step (d) has insecticidal activity on the plant pest. If the interfering RNA has insecticidal activity on the plant pest target gene, an orthologous target gene for using in the control of a plant pest has been identified.

[0024] These and other aspects of the invention are set forth in more detail in the description of the invention below.

### BRIEF DESCRIPTION OF THE SEQUENCES IN THE SEQUENCE LISTING

[0025] The nucleic acid sequences listed in the accompanying sequence listing are shown using standard letter abbreviations for nucleotide bases, as defined in 37 C.F.R. § 1.822. The nucleic acid and amino acid sequences listed define molecules (i.e., polynucleotides and polypeptides, respectively) having the nucleotide and amino acid monomers arranged in the manner described. The nucleic acid and amino acid sequences listed also each define a genus of polynucleotides or polypeptides that comprise the nucleotide and amino acid monomers arranged in the manner described. In view of the redundancy of the genetic code, it will be understood that a nucleotide sequence including a coding sequence also describes the genus of polynucleotides encoding the same polypeptide as a polynucleotide consisting of the reference sequence. It will further be understood that an amino acid sequence describes the genus of polynucleotide ORFs encoding that polypeptide.

[0026] Only one strand of each nucleic acid sequence is shown, but the complementary strand is understood as included by any reference to the displayed strand. As the complement and reverse complement of a primary nucleic acid sequence are necessarily disclosed by the primary sequence, the complementary sequence and reverse complementary sequence reference to the nucleic acid sequence, unless it is explicitly stated to be otherwise (or it is clear to be otherwise from the context in which the sequence appears). Furthermore, as it is understood in the art that the nucleotide sequence of an RNA strand is determined by the sequence of the DNA from which it was transcribed (but for the substitution of uracil (U) nucleobases for thymine (T)), an RNA sequence is included by any reference to the DNA sequence encoding it. In the accompanying sequence listing:

[0027] SEQ ID NOs: 1-17 are DNA coding sequences of the 17 Phyllotreta armoraciae target genes identified for assaying in the RNAi-based screen for insecticidal activity.

[0028] SEQ ID NOs: 18-34 are DNA coding sequences of the 17 Psylliodes chrysocephala target genes identified for assaying in the RNAi-based screen for insecticidal activity.

[0029] SEQ ID NOs: 35-51 are DNA coding sequences of the 21 Phyllotreta nemorum target genes identified for assaying in the RNAi-based screen for insecticidal activity.

[0030] SEQ ID NOs: 52-68 are DNA coding sequences of the 21 Phyllotreta striolata target genes identified for assaying in the RNAi-based screen for insecticidal activity.

[0031] SEQ ID NOs: 69-85 are DNA coding sequences of the 21 Phyllotreta atra target genes identified for assaying in the RNAi-based screen for insecticidal activity.

[0032] SEQ ID NOs: 86-102 are DNA coding sequences of the 21 Phyllotreta cruciferae target genes identified for assaying in the RNAi-based screen for insecticidal activity.

[0033] SEQ ID NOs: 103-119 are fragments of DNA coding sequences of P. armoraciae used to synthesize interfering RNA molecules to test for insecticidal activity in the RNAi-based screen.

[0034] SEQ ID NOs: 120-136 are fragments of DNA coding sequences of P. chrysocephala used to synthesize interfering RNA molecules to test for insecticidal activity in the RNAi-based screen.

[0035] SEQ ID NOs: 137-153 are fragments of DNA coding sequences of P. nemorum used to synthesize interfering RNA molecules to test for insecticidal activity in the RNAi-based screen.

[0036] SEQ ID NOs: 154-170 are fragments of DNA coding sequences of P. striolata used to synthesize interfering RNA molecules to test for insecticidal activity in the RNAi-based screen.

[0037] SEQ ID NOs: 171-187 are fragments of DNA coding sequences of P. atra used to synthesize interfering RNA molecules to test for insecticidal activity in the RNAi-based screen.

[0038] SEQ ID NOs: 188-204 are fragments of DNA coding sequences of P. cruciferae used to synthesize interfering RNA molecules to test for insecticidal activity in the RNAi-based screen.

[0039] SEQ ID NOs: 205-221 are DNA sequences of forward primers and SEQ ID NOs: 307-323 are DNA sequences of the corresponding reverse primers for producing the fragments of SEQ ID NOs: 103-119.

[0040] SEQ ID NOs: 222-238 are DNA sequences of forward primers and SEQ ID NOs: 324-340 are DNA sequences of the corresponding reverse primers for producing the fragments of SEQ ID NOs: 120-136.

[0041] SEQ ID NOs: 239-255 are DNA sequences of forward primers and SEQ ID NOs: 341-357 are DNA sequences of the corresponding reverse primers for producing the fragments of SEQ ID NOs: 137-153.

[0042] SEQ ID NOs: 256-272 are DNA sequences of forward primers and SEQ ID NOs: 358-374 are DNA sequences of the corresponding reverse primers for producing the fragments of SEQ ID NOs: 154-170.

[0043] SEQ ID NOs: 273-289 are DNA sequences of forward primers and SEQ ID NOs: 375-391 are DNA sequences of the corresponding reverse primers for producing the fragments of SEQ ID NOs: 171-187.

[0044] SEQ ID NOs: 290-306 are DNA sequences of forward primers and SEQ ID NOs: 392-408 are DNA sequences of the corresponding reverse primers for producing the fragments of SEQ ID NOs: 188-204.

[0045] SEQ ID NOs: 409-425 are the sense RNA sequences of the P. armoraciae DNA coding sequences of SEQ ID NOs: 1-17.

[0046] SEQ ID NOs: 426-442 are the sense RNA sequences of the P. chrysocephala DNA coding sequences of SEQ ID NOs: 18-34.

[0047] SEQ ID NOs: 443-459 are the sense RNA sequences of the P. nemorum DNA coding sequences of SEQ ID NOs: 35-51.

[0048] SEQ ID NOs: 460-476 are the sense RNA sequences of the P. striolata DNA coding sequences of SEQ ID NOs: 52-68.

[0049] SEQ ID NOs: 477-493 are the sense RNA sequences of the P. atra DNA coding sequences of SEQ ID NOs: 69-85

[0050] SEQ ID NOs: 494-510 are the sense RNA sequences of the P. cruciferae DNA coding sequences of SEQ ID NOs: 86-102.

[0051] SEQ ID NOs: 511-527 are the sense RNA sequences of the P. armoraciae DNA coding sequence fragments of SEQ ID NOs: 103-119.

[0052] SEQ ID NOs: 528-544 are the sense RNA sequences of the P. chrysocephala DNA coding sequence fragments of SEQ ID NOs: 120-136.

[0053] SEQ ID NOs: 545-561 are the sense RNA sequences of the P. nemorum DNA coding sequence fragments of SEQ ID NOs: 137-153.

[0054] SEQ ID NOs: 562-578 are the sense RNA sequences of the P. striolata DNA coding sequence fragments of SEQ ID NOs: 154-170.

[0055] SEQ ID NOs: 579-595 are the sense RNA sequences of the P. atra DNA coding sequence fragments of SEQ ID NOs: 171-187.

[0056] SEQ ID NOs: 596-612 are the sense RNA sequences of the P. cruciferae DNA coding sequence fragments of SEQ ID NOs: 188-204.

[0057] SEQ ID NOs: 613-629 are amino acid sequences encoded by the P. armoraciae DNA coding sequences of SEQ ID Nos: 1-17.

[0058] SEQ ID NOs: 630-646 are amino acid sequences encoded by the P. chrysocephala DNA coding sequences of SEQ ID Nos: 18-34.

[0059] SEQ ID NOs: 647-663 are amino acid sequences encoded by the P. nemorum DNA coding sequences of SEQ ID Nos: 35-51.

[0060] SEQ ID NOs: 664-680 are amino acid sequences encoded by the P. striolata DNA coding sequence of SEQ ID NOs: 52-68.

[0061] SEQ ID NOs: 681-697 are amino acid sequences encoded by the P. atra DNA coding sequence of SEQ ID NOs: 69-85.

[0062] SEQ ID NOs: 698-714 are amino acid sequences encoded by the P. cruciferae DNA coding sequence of SEQ ID NOs: 86-102.

### DETAILED DESCRIPTION

[0063] The following is a detailed description of the invention provided to aid those skilled in the art in practicing the invention. This description is not intended to be a detailed catalog of all the different ways in which the invention may be implemented, or all the features that may be added to the instant invention. For example, features illustrated with respect to one embodiment may be incorporated into other embodiments, and features illustrated with respect to a particular embodiment may be deleted from that embodiment. In addition, numerous variations and additions to the various embodiments of the invention will be apparent to those skilled in the art in light of the instant disclosure, which do not depart from the invention. Hence, the following descriptions are intended to illustrate some particular embodiments of the invention, and not to exhaustively specify all permutations, combinations and variations thereof. Those of ordinary skill in the art will recognize that modifications and variations in the embodiments described herein may be made without departing from the spirit or scope of the invention.

[0064] Unless otherwise defined, all technical and scientific terms used herein have the same meaning as commonly understood by one of ordinary skill in the art to which this invention belongs. The terminology used in the description of the invention herein is for the purpose of describing particular embodiments only and is not intended to be limiting of the invention.

[0065] For clarity, certain terms used in the specification are defined and presented as follows:

[0066] As used herein, “a,” “an” or “the” can mean one or more than one. For example, “a cell” can mean a single cell or a multiplicity of cells.

[0067] As used herein, “and/or” refers to and encompasses any and all possible combinations of one or more of the associated listed items, as well as the lack of combinations when interpreted in the alternative (or).

[0068] Further, the term “about,” as used herein when referring to a measurable value such as an amount of a compound or agent, dose, time, temperature, and the like, is meant to encompass variations of ±20%, ±10%, ±5%, ±1%, ±0.5%, or even ±0.1% of the specified amount.

[0069] As used herein, the transitional phrase “consisting essentially of” means that the scope of a claim is to be interpreted to encompass the specified materials or steps recited in the claim and those that do not materially affect the basic and novel characteristic(s) of the claimed invention. Thus, the term “consisting essentially of” when used in a claim of this invention is not intended to be interpreted to be equivalent to “comprising.” A “coding sequence” is a nucleic acid sequence that is transcribed into RNA such as mRNA, rRNA, tRNA, snRNA, sense RNA or antisense RNA. Preferably the RNA is then translated in an organism to produce a protein.

[0070] The terms “sequence similarity” or “sequence identity” of nucleotide or amino acid sequences mean a degree of identity or similarity of two or more sequences and may be determined conventionally by using known software or computer programs such as the Best-Fit or Gap pairwise comparison programs (GCG Wisconsin Package, Genetics Computer Group, 575 Science Drive, Madison, Wis. 53711). BestFit uses the local homology algorithm of Smith and Waterman, Advances in Applied Mathematics 2:482-489 (1981), to find the best segment of identity or similarity between two sequences. Sequence comparison between two or more polynucleotides or polypeptides is generally performed by comparing portions of the two sequences over a comparison window to identify and compare local regions of sequence similarity. The comparison window is generally from about 20 to 200 contiguous nucleotides. Gap performs global alignments: all of one sequence with all of another similar sequence using the method of Needleman and Wunsch, J. Mol. Biol. 48:443-453 (1970). When using a sequence alignment program such as BestFit to determine the degree of DNA sequence homology, similarity or identity, the default setting may be used, or an appropriate scoring matrix may be selected to optimize identity, similarity or homology scores. Similarly, when using a program such as BestFit to determine sequence identity, similarity or homology between two different amino acid sequences, the default settings may be used, or an appropriate scoring matrix, such as blosum45 or blosum80, may be selected to optimize identity, similarity or homology scores.

[0071] The phrase “substantially identical,” in the context of two nucleic acids or two amino acid sequences, refers to two or more sequences or subsequences that have at least about 50% nucleotide or amino acid residue identity when compared and aligned for maximum correspondence as measured using one of the following sequence comparison algorithms or by visual inspection. In certain embodiments, substantially identical sequences have at least about 60%, or at least about 70%, or at least about 80%, or even at least about 90% or 95% nucleotide or amino acid residue identity. In certain embodiments, substantial identity exists over a region of the sequences that is at least about 50 residues in length, or over a region of at least about 100 residues, or the sequences are substantially identical over at least about 150 residues. In further embodiments, the sequences are substantially identical when they are identical over the entire length of the coding regions.

[0072] The term “homology” in the context of the invention refers to the level of similarity between nucleic acid or amino acid sequences in terms of nucleotide or amino acid identity or similarity, respectively, i.e., sequence similarity or identity. Homology, homologue, and homologous also refers to the concept of similar functional properties among different nucleic acids or proteins. Homologues include genes that are orthologous and paralogous. Homologues can be determined by using the coding sequence for a gene, disclosed herein or found in appropriate database (such as that at NCBI or others) in one or more of the following ways. For an amino acid sequence, the sequences should be compared using algorithms (for instance see section on “identity” and “substantial identity”). For nucleotide sequences the sequence of one DNA molecule can be compared to the sequence of a known or putative homologue in much the same way. Homologues are at least 20% identical, or at least 30% identical, or at least 40% identical, or at least 50% identical, or at least 60% identical, or at least 70% identical, or at least 80% identical, or at least 88% identical, or at least 90% identical, or at least 92% identical, or at least 95% identical, across any substantial region of the molecule (DNA, RNA, or protein molecule).

[0073] Optimal alignment of sequences for comparison can be conducted, e.g., by the local homology algorithm of Smith & Waterman, Adv. Appl. Math. 2: 482 (1981), by the homology alignment algorithm of Needleman & Wunsch, J. Mol. Biol. 48: 443 (1970), by the search for similarity method of Pearson & Lipman, Proc. Nat'l. Acad. Sci. USA 85: 2444 (1988), by computerized implementations of these algorithms (GAP, BESTFIT, FASTA, and TFASTA in the Wisconsin Genetics Software Package, Genetics Computer Group, 575 Science Dr., Madison, Wis.), or by visual inspection (see generally, Ausubel et al., infra).

[0074] One example of an algorithm that is suitable for determining percent sequence identity and sequence similarity is the BLAST algorithm, which is described in Altschul et al., J. Mol. Biol. 215: 403-410 (1990). Software for performing BLAST analyses is publicly available through the National Center for Biotechnology Information (http://www.ncbi.nlm.nih.gov/). This algorithm involves first identifying high scoring sequence pairs (HSPs) by identifying short words of length W in the query sequence, which either match or satisfy some positive-valued threshold score T when aligned with a word of the same length in a database sequence. T is referred to as the neighborhood word score threshold (Altschul et al., 1990). These initial neighborhood word hits act as seeds for initiating searches to find longer HSPs containing them. The word hits are then extended in both directions along each sequence for as far as the cumulative alignment score can be increased. Cumulative scores are calculated using, for nucleotide sequences, the parameters M (reward score for a pair of matching residues; always >0) and N (penalty score for mismatching residues; always <0). For amino acid sequences, a scoring matrix is used to calculate the cumulative score. Extension of the word hits in each direction are halted when the cumulative alignment score falls off by the quantity X from its maximum achieved value, the cumulative score goes to zero or below due to the accumulation of one or more negative-scoring residue alignments, or the end of either sequence is reached. The BLAST algorithm parameters W, T, and X determine the sensitivity and speed of the alignment. The BLASTN program (for nucleotide sequences) uses as defaults a wordlength (W) of 11, an expectation (E) of 10, a cutoff of 100, M=5, N=−4, and a comparison of both strands. For amino acid sequences, the BLASTP program uses as defaults a wordlength (W) of 3, an expectation (E) of 10, and the BLOSUM62 scoring matrix (see Henikoff & Henikoff, Proc. Natl. Acad. Sci. USA 89: 10915 (1989)).

[0075] In addition to calculating percent sequence identity, the BLAST algorithm also performs a statistical analysis of the similarity between two sequences (see, e.g., Karlin & Altschul, Proc. Nat'l. Acad. Sci. USA 90: 5873-5787 (1993)). One measure of similarity provided by the BLAST algorithm is the smallest sum probability (P(N)), which provides an indication of the probability by which a match between two nucleotide or amino acid sequences would occur by chance. For example, a test nucleic acid sequence is considered similar to a reference sequence if the smallest sum probability in a comparison of the test nucleic acid sequence to the reference nucleic acid sequence is less than about 0.1, more preferably less than about 0.01, and most preferably less than about 0.001.

[0076] Another widely used and accepted computer program for performing sequence alignments is CLUSTALW v1.6 (Thompson, et al. Nuc. Acids Res., 22: 4673-4680, 1994). The number of matching bases or amino acids is divided by the total number of bases or amino acids, and multiplied by 100 to obtain a percent identity. For example, if two 580 base pair sequences had 145 matched bases, they would be 25 percent identical. If the two compared sequences are of different lengths, the number of matches is divided by the shorter of the two lengths. For example, if there were 100 matched amino acids between a 200 and a 400 amino acid proteins, they are 50 percent identical with respect to the shorter sequence. If the shorter sequence is less than 150 bases or 50 amino acids in length, the number of matches are divided by 150 (for nucleic acid bases) or 50 (for amino acids), and multiplied by 100 to obtain a percent identity.

[0077] Two nucleotide sequences can also be considered to be substantially identical when the two sequences hybridize to each other under stringent conditions. In representative embodiments, two nucleotide sequences considered to be substantially identical hybridize to each other under highly stringent conditions.

[0078] The terms “stringent conditions” or “stringent hybridization conditions” include reference to conditions under which a polynucleotide will hybridize to its target sequence to a detectably greater degree than other sequences (e.g., at least 2-fold over background). Stringent conditions are sequence-dependent and will be different in different circumstances. By controlling the stringency of the hybridization and/or washing conditions, target polynucleotides can be identified which are 100% complementary to the probe (homologous probing). Alternatively, stringency conditions can be adjusted to allow some mismatching in sequences so that lower degrees of similarity are detected (heterologous probing). Typically, stringent conditions will be those in which the salt concentration is less than approximately 1.5 M Na ion, typically about 0.01 to 1.0 M Na ion (or other salts) at pH 7.0 to 8.3 and the temperature is at least about 30° C. for short probes (e.g., 10 to 50 nucleotides) and at least about 60° C. for long probes (e.g., greater than 50 nucleotides). Stringent conditions also may be achieved with the addition of destabilizing agents such as formamide. Exemplary low stringency conditions include hybridization with a buffer solution of 30 to 35% formamide, 1 M NaCl, 1% SDS (w/v; sodium dodecyl sulphate) at 37° C., and a wash in 1× to 2×SSC (20×SSC=3.0 M NaCl/0.3 M trisodium citrate) at 50 to 55° C. Moderate stringency conditions detect sequences that share at least 80% sequence identity. Exemplary moderate stringency conditions include hybridization in 40 to 45% formamide, 1 M NaCl, 1% SDS at 37° C., and a wash in 0.5× to 1×SSC at 55 to 60° C. High stringency conditions detect sequences that share at least 90% sequence identity. Exemplary high stringency conditions include hybridization in 50% formamide, 1 M NaCl, 1% SDS at 37° C., and a wash in 0.1×SSC at 60 to 65° C. Specificity is typically the function of post-hybridization washes, the critical factors being the ionic strength and temperature of the final wash solution. For DNA-DNA hybrids, the Tm can be approximated from the equation of Meinkoth and Wahl (Anal. Biochem., 138:267-284, 1984): Tm=81.5° C.+16.6 (log M)+0.41 (% GC)−0.61 (% form)−500/L; where M is the molarity of monovalent cations, % GC is the percentage of guanosine and cytosine nucleotides in the DNA, % form is the percentage of formamide in the hybridization solution, and L is the length of the hybrid in base pairs. The Tm is the temperature (under defined ionic strength and pH) at which 50% of a complementary target sequence hybridizes to a perfectly matched probe. Tm is reduced by about 1° C. for each 1% of mismatching; thus, Tm, hybridization and/or wash conditions can be adjusted to hybridize to sequences of the desired identity. For example, if sequences with approximately 90% identity are sought, the Tm can be decreased 10° C. Generally, stringent conditions are selected to be about 5° C. lower than the thermal melting point (Tm) for the specific sequence and its complement at a defined ionic strength and pH. However, severely stringent conditions can utilize hybridization and/or wash at 1, 2, 3, or 4° C. lower than the thermal melting point (Tm); moderately stringent conditions can utilize a hybridization and/or wash at 6, 7, 8, 9, or 10° C. lower than the thermal melting point (Tm); low stringency conditions can utilize a hybridization and/or wash at 11, 12, 13, 14, 15, or 20° C. lower than the thermal melting point (Tm). Using the equation, hybridization and wash compositions, and desired Tm, those of ordinary skill will understand that variations in the stringency of hybridization and/or wash solutions are inherently described. If the desired degree of mismatching results in a Tm of less than 45° C. (aqueous solution) or 32° C. (formamide solution), it is preferred to increase the SSC concentration so that a higher temperature can be used. An extensive guide to the hybridization of nucleic acids is found in Tijssen, Laboratory Techniques in Biochemistry and Molecular Biology—Hybridization with Nucleic Acid Probes, Part I, Chapter 2 “Overview of principles of hybridization and the strategy of nucleic acid probe assays”, Elsevier, N.Y. (1993); and Current Protocols in Molecular Biology, Chapter 2, Ausubel, et al., eds., Greene Publishing and Wiley-Interscience, New York (1995). Methods of stringent hybridization are known in the art which conditions can be calculated by means known in the art. This is disclosed in Sambrook et al., Molecular Cloning: A Laboratory Manual, 2nd Ed., Cold Spring Harbor Laboratory Press, 1989, Cold Spring Harbor, N.Y. and Current Protocols in Molecular Biology, Ausebel et al, eds., John Wiley and Sons, Inc., 2000. Methods of determining percent sequence identity are known in the art, an example of which is the GCG computer sequence analysis software (GCG, Inc, Madison Wis.).

[0079] Nucleic acids that do not hybridize to each other under stringent conditions are still substantially identical if the proteins that they encode are substantially identical (e.g., due to the degeneracy of the genetic code).

[0080] A further indication that two nucleic acids or proteins are substantially identical is that the protein encoded by the first nucleic acid is immunologically cross reactive with the protein encoded by the second nucleic acid. Thus, a protein is typically substantially identical to a second protein, for example, where the two proteins differ only by conservative substitutions.

[0081] A nucleic acid sequence is “isocoding with” a reference nucleic acid sequence when the nucleic acid sequence encodes a polypeptide having the same amino acid sequence as the polypeptide encoded by the reference nucleic acid sequence.

[0082] As used herein, “complementary” polynucleotides are those that are capable of base pairing according to the standard Watson-Crick complementarity rules. Specifically, purines will base pair with pyrimidines to form a combination of guanine paired with cytosine (G:C) and adenine paired with either thymine (A:T) in the case of DNA, or adenine paired with uracil (A:U) in the case of RNA. For example, the sequence “A-G-T” binds to the complementary sequence “T-C-A.” It is understood that two polynucleotides may hybridize to each other even if they are not completely complementary to each other, provided that each has at least one region that is substantially complementary to the other.

[0083] The terms “complementary” or “complementarity,” refer to the natural binding of polynucleotides under permissive salt and temperature conditions by base-pairing. Complementarity between two single-stranded molecules may be “partial,” in which only some of the nucleotides bind, or it may be complete when total complementarity exists between the single stranded molecules. The degree of complementarity between nucleic acid strands has significant effects on the efficiency and strength of hybridization between nucleic acid strands.

[0084] As used herein, the terms “substantially complementary” or “partially complementary” mean that two nucleic acid sequences are complementary at least about 50%, 60%, 70%, 80% or 90% of their nucleotides. In some embodiments, the two nucleic acid sequences can be complementary at least at 85%, 90%, 95%, 96%, 97%, 98%, 99% or more of their nucleotides. The terms “substantially complementary” and “partially complementary” can also mean that two nucleic acid sequences can hybridize under high stringency conditions and such conditions are well known in the art.

[0085] As used herein, “dsRNA” or “RNAi” refers to a polyribonucleotide structure formed either by a single self-complementary RNA strand or at least by two complementary RNA strands. The degree of complementary, in other words the % identity, need not necessarily be 100%. Rather, it must be sufficient to allow the formation of a double-stranded structure under the conditions employed. As used herein, the term “fully complementary” means that all the bases of the nucleotide sequence of the dsRNA are complementary to or ‘match’ the bases of the target nucleotide sequence. The term “at least partially complementary” means that there is less than a 100% match between the bases of the dsRNA and the bases of the target nucleotide sequence. The skilled person will understand that the dsRNA need only be at least partially complementary to the target nucleotide sequence in order to mediate down-regulation of expression of the target gene. It is known in the art that RNA sequences with insertions, deletions and mismatches relative to the target sequence can still be effective at RNAi. According to the current invention, it is preferred that the dsRNA and the target nucleotide sequence of the target gene share at least 80% or 85% sequence identity, preferably at least 90% or 95% sequence identity, or more preferably at least 97% or 98% sequence identity and still more preferably at least 99% sequence identity. Alternatively, the dsRNA may comprise 1, 2 or 3 mismatches as compared with the target nucleotide sequence over every length of 24 partially complementary nucleotides. It will be appreciated by the person skilled in the art that the degree of complementarity shared between the dsRNA and the target nucleotide sequence may vary depending on the target gene to be down-regulated or depending on the insect pest species in which gene expression is to be controlled.

[0086] It will be appreciated that the dsRNA may comprise or consist of a region of double-stranded RNA comprising annealed complementary strands, one strand of which, the sense strand, comprises a sequence of nucleotides at least partially complementary to a target nucleotide sequence within a target gene.

[0087] The target nucleotide sequence may be selected from any suitable region or nucleotide sequence of the target gene or RNA transcript thereof. For example, the target nucleotide sequence may be located within the 5′UTR or 3′UTR of the target gene or RNA transcript or within exonic or intronic regions of the gene. The skilled person will be aware of methods of identifying the most suitable target nucleotide sequences within the context of the full-length target gene. For example, multiple dsRNAs targeting different regions of the target gene can be synthesised and tested. Alternatively, digestion of the RNA transcript with enzymes such as RNAse H can be used to determine sites on the RNA that are in a conformation susceptible to gene silencing. Target sites may also be identified using in silico approaches, for example, the use of computer algorithms designed to predict the efficacy of gene silencing based on targeting different sites within the full-length gene.

[0088] Preferably, the % identity of a polyribonucleotide is determined by GAP (Needleman and Wunsch, 1970) analysis (GCG program) using the default settings, wherein the query sequence is at least about 21 to about 23 nucleotides in length, and the GAP analysis aligns the two sequences over a region of at least about 21 nucleotides. In another embodiment, the query sequence is at least 150 nucleotides in length, and the GAP analysis aligns the two sequences over a region of at least 150 nucleotides. In a further embodiment, the query sequence is at least 300 nucleotides in length and the GAP analysis aligns the two sequences over a region of at least 300 nucleotides. In yet another embodiment, the query sequence corresponds to the full length of the target RNA, for example mRNA, and the GAP analysis aligns the two sequences over the full length of the target RNA.

[0089] Conveniently, the dsRNA can be produced from a single open reading frame in a recombinant host cell, wherein the sense and anti-sense sequences are flanked by an unrelated sequence which enables the sense and anti-sense sequences to hybridize to form the dsRNA molecule with the unrelated sequence forming a loop structure. In some embodiments, the sense strand and antisense strand can be made without an open reading frame to ensure that no protein will be made in the transgenic host cell. The two strands can also be expressed separately as two transcripts, one encoding the sense strand and one encoding the antisense strand.

[0090] RNA duplex formation can be initiated either inside or outside the cell. The dsRNA can be partially or fully double-stranded. The RNA can be enzymatically or chemically synthesized, either in vitro or in vivo.

[0091] The dsRNA need not be full length relative to either the primary transcription product or fully processed RNA. It is well-known in the art that small dsRNA of about 19-23 bp in length can be used to trigger gene silencing of a target gene. Generally, higher identity can be used to compensate for the use of a shorter sequence. Furthermore, the dsRNA can comprise single stranded regions as well, e.g., the dsRNA can be partially or fully double stranded. The double stranded region of the dsRNA can have a length of at least about 19 to about 23 base pairs, optionally a sequence of about 19 to about 50 base pairs, optionally a sequence of about 50 to about 100 base pairs, optionally a sequence of about 100 to about 200 base pairs, optionally a sequence of about 200 to about 500, and optionally a sequence of about 500 to about 1000 or more base pairs, up to a molecule that is double stranded for its full length, corresponding in size to a full length target RNA molecule. Bolognesi et al (2012, PLOS One, 7(10): e47534) teach that dsRNAs greater than or equal to about 60 bp are required for biological activity in artificial diet bioassays with Southern Corn Rootworm (SCR; Diabrotica undecimpunctata howardii).

[0092] Mao et al (2007, Nature Biotechnology, 35(11): 1307-1313) teach a transgenic plant expressing a dsRNA construct against a target gene (CYP6AE14) of an insect pest (cotton bollworm, Helicoverpa armigera). Insects feeding on the transgenic plant have small RNAs of about 19-23 bp in size of the target gene in their midgut, with a corresponding reduction in CYP6AE14 transcripts and protein. This suggests that the small RNAs were efficacious in reducing expression of the target gene in the insect pest. Therefore, small RNAs of about 19 bp, about 20 bp, about 21 bp, about 22 bp, about 23 bp, about 24 bp, about 25 bp, about 26 bp, about 27 bp, about 28 bp, about 29 bp, or about 30 bp may be efficacious in reducing expression of the target gene in an insect pest.

[0093] Alternatively, the dsRNA may comprise a target dsRNA of at least 19 base pairs, and the target dsRNA may be within a dsRNA “carrier” or “filler” sequence. For example, Bolognesi et al (2012) show that a 240 bp dsRNA encompassing a target dsRNA, which comprised a 21 bp contiguous sequence with 100% identity to the target sequence, had biological activity in bioassays with Southern Corn Rootworm. The target dsRNA may have a length of at least 19 to about 25 base pairs, optionally a sequence of about 19 to about 50 base pairs, optionally a sequence of about 50 to about 100 base pairs, optionally a sequence of about 100 to about 200 base pairs, optionally a sequence of about 200 to about 500, and optionally a sequence of about 500 to about 1000 or more base pairs. Combined with the carrier dsRNA sequence, the dsRNA of the target sequence and the carrier dsRNA may have a total length of at least about 50 to about 100 base pairs, optionally a sequence of about 100 to about 200 base pairs, optionally a sequence of about 200 to about 500, and optionally a sequence of about 500 to about 1000 or more base pairs.

[0094] The dsRNA can contain known nucleotide analogs or modified backbone residues or linkages, which are synthetic, naturally occurring, and non-naturally occurring. Examples of such analogs include, without limitation, phosphorothioates, phosphoramidates, methyl phosphonates, chiralmethyl phosphonates and 2-O-methyl ribonucleotides.

[0095] As used herein, the term “specifically reduce the level of a target RNA and/or the production of a target protein encoded by the RNA”, and variations thereof, refers to the sequence of a portion of one strand of the dsRNA being sufficiently identical to the target RNA such that the presence of the dsRNA in a cell reduces the steady state level and/or the production of said RNA. In many instances, the target RNA will be mRNA, and the presence of the dsRNA in a cell producing the mRNA will result in a reduction in the production of said protein. Preferably, this accumulation or production is reduced at least 10%, more preferably at least 50%, even more preferably at least 75%, yet even more preferably at least 95% and most preferably 100%, when compared to a wild-type cell.

[0096] The consequences of inhibition can be confirmed by examination of the outward properties of the cell or organism or by biochemical techniques such as, but not limited to, Northern hybridization, reverse transcription, gene expression monitoring with a microarray, antibody binding, enzyme linked immunosorbent assay (ELISA), Western blotting, radioimmunoassay (RIA), and other immunoassays.

[0097] The interfering RNAs of the current invention may comprise one dsRNA or multiple dsRNAs, wherein each dsRNA comprises or consists of a sequence of nucleotides which is at least partially complementary to a target nucleotide sequence within the target gene and that functions upon uptake by an insect pest species to down-regulate expression of said target gene. Concatemeric RNA constructs of this type are described in WO2006/046148. In the context of the present invention, the term ‘multiple’ means at least two, at least three, at least four, etc and up to at least 10, 15, 20 or at least 30. In one embodiment, the interfering RNA comprises multiple copies of a single dsRNA i.e. repeats of a dsRNA that binds to a particular target nucleotide sequence within a specific target gene. In another embodiment, the dsRNAs within the interfering RNA comprise or consist of different sequences of nucleotides complementary to different target nucleotide sequences. It should be clear that combinations of multiple copies of the same dsRNA combined with dsRNAs binding to different target nucleotide sequences are within the scope of the current invention.

[0098] The dsRNAs may be arranged as one contiguous region of the interfering RNA or may be separated by the presence of linker sequences. The linker sequence may comprise a short random nucleotide sequence that is not complementary to any target nucleotide sequences or target genes. In one embodiment, the linker is a conditionally self-cleaving RNA sequence, preferably a pH-sensitive linker or a hydrophobic-sensitive linker. In one embodiment, the linker comprises a sequence of nucleotides equivalent to an intronic sequence. Linker sequences of the current invention may range in length from about 1 base pair to about 10000 base pairs, provided that the linker does not impair the ability of the interfering RNA to down-regulate the expression of target gene(s).

[0099] In addition to the dsRNA(s) and any linker sequences, the interfering RNA of the invention may comprise at least one additional polynucleotide sequence. In different embodiments of the invention, the additional sequence is chosen from (i) a sequence capable of protecting the interfering RNA against RNA processing, (ii) a sequence affecting the stability of the interfering RNA, (iii) a sequence allowing protein binding, for example to facilitate uptake of the interfering RNA by cells of the insect pest species, (iv) a sequence facilitating large-scale production of the interfering RNA, (v) a sequence which is an aptamer that binds to a receptor or to a molecule on the surface of the insect pest cells to facilitate uptake, or (vi) a sequence that catalyses processing of the interfering RNA within the insect pest cells and thereby enhances the efficacy of the interfering RNA. Structures for enhancing the stability of RNA molecules are well known in the art and are described further in WO2006/046148.

[0100] The interfering RNA may contain DNA bases, non-natural bases or non-natural backbone linkages or modifications of the sugar-phosphate backbone, for example to enhance stability during storage or enhance resistance to degradation by nucleases. Furthermore, the interfering RNA may be produced chemically or enzymatically by one skilled in the art through manual or automated reactions. Alternatively, the interfering RNA may be transcribed from a polynucleotide encoding the same. Thus, provided herein is an isolated polynucleotide encoding any of the interfering RNAs of the current invention.

[0101] The term “plant microRNA precursor molecule” as used herein describes a small (^{˜}70-300 nt) non-coding RNA sequence that is processed by plant enzymes to yield a ^{˜}19-24 nucleotide product known as a mature microRNA sequence. The mature sequences have regulatory roles through complementarity to messenger RNA (mRNA). The term “artificial plant microRNA precursor molecule” describes the non-coding miRNA precursor sequence prior to processing that is employed as a backbone sequence for the delivery of a siRNA molecule via substitution of the endogenous native miRNA/miRNA* duplex of the miRNA precursor molecule with that of a non-native, heterologous miRNA (amiRNA/amiRNA*; e.g. siRNA/siRNA*) that is then processed into the mature miRNA sequence with the siRNA sequence.

[0102] In the context of the invention, the term “toxic” used to describe a dsRNA of the invention means that the dsRNA molecules of the invention and combinations of such dsRNA molecules function as orally active insect control agents that have a negative effect on an insect. When a composition of the invention is delivered to the insect, the result is typically death of the insect, or the insect does not feed upon the source that makes the composition available to the insect. Such a composition may be a transgenic plant expressing the dsRNA of the invention.

[0103] To “control” or “controlling” insects means to inhibit, through a toxic effect, the ability of one or more insect pests to survive, grow, feed, and/or reproduce, or to limit insect-related damage or loss in crop plants. To “control” insects may or may not mean killing the insects, although it preferably means killing the insects. A composition that controls a target insect has insecticidal activity against the target insect.

[0104] To “deliver” or “delivering” a composition or dsRNA means that the composition or dsRNA comes in contact with an insect, resulting in a toxic effect and control of the insect. The composition or dsRNA can be delivered in many recognized ways, e.g., orally by ingestion by the insect via transgenic plant expression, formulated composition(s), sprayable composition(s), a bait matrix, or any other art-recognized toxicant delivery system.

[0105] The term “insect” as used herein includes any organism now known or later identified that is classified in the animal kingdom, phylum Arthropoda, class Insecta, including but not limited to insects in the orders Coleoptera (beetles), Lepidoptera (moths, butterflies), Diptera (flies), Protura, Collembola (springtails), Diplura, Microcoryphia (jumping bristletails), Thysanura (bristletails, silverfish), Ephemeroptera (mayflies), Odonata (dragonflies, damselflies), Orthoptera (grasshoppers, crickets, katydids), Phasmatodea (walkingsticks), Grylloblattodea (rock crawlers), Mantophasmatodea, Dermaptera (earwigs), Plecoptera (stoneflies), Embioptera (web spinners), Zoraptera, Isoptera (termites), Mantodea (mantids), Blattodea (cockroaches), Hemiptera (true bugs, cicadas, leafhoppers, aphids, scales), Thysanoptera (thrips), Psocoptera (book and bark lice), Phthiraptera (lice; including but not limited to suborders Amblycera, Ischnocera and Anoplura), Neuroptera (lacewings, owlflies, mantispids, antlions), Hymenoptera (bees, ants, wasps), Trichoptera (caddisflies), Siphonaptera (fleas), Mecoptera (scorpion flies), Strepsiptera (twisted-winged parasites), and any combination thereof.

[0106] A “life stage of an Alticini insect” or “flea beetle life stage” means the egg, larval, pupal or adult developmental form of an insect of the Alticini tribe, namely a species of flea beetle.

[0107] “Effective insect-controlling amount” of “insecticidally effective amount” means that concentration of dsRNA that inhibits, through a toxic effect, the ability of insects to survive, grow, feed and/or reproduce, or to limit insect-related damage or loss in crop plants. “Insecticidally effective amount” may or may not mean a concentration that kills the insects, although it preferably means that it kills the insects. In some embodiments, application of an insecticidally effective amount of the polynucleotide, such as a dsRNA molecule, to a plant improves the plant's resistance to infestation by the insect. In some embodiments, application of an insecticidally effective amount of the polynucleotide, such as a dsRNA molecule, to a crop plant improves yield (e.g., increased biomass, increased seed or fruit production, or increased oil, starch, sugar, or protein content) of that crop plant, in comparison to a crop plant not treated with the polynucleotide. While there is no upper limit on the concentrations and dosages of a polynucleotide as described herein that can be useful in the methods and compositions provided herein, lower effective concentrations and dosages will generally be sought for efficiency and economy.

[0108] Non-limiting embodiments of effective amounts of a polynucleotide include a range from about 10 nano grams per milliliter to about 100 micrograms per milliliter of a polynucleotide in a liquid form sprayed on a plant, or from about 10 milligrams per acre to about 100 grams per acre of polynucleotide applied to a field of plants, or from about 0.001 to about 0.1 microgram per milliliter of polynucleotide in an artificial diet for feeding the insect. Where compositions as described herein are topically applied to a plant, the concentrations can be adjusted in consideration of the volume of spray or treatment applied to plant leaves or other plant part surfaces, such as flower petals, stems, tubers, fruit, anthers, pollen, leaves, roots, or seeds. In one embodiment, a useful treatment for herbaceous plants using 25-mer polynucleotides is about 1 nanomole (nmol) of polynucleotides per plant, for example, from about 0.05 to 1 nmol polynucleotides per plant. Other embodiments for herbaceous plants include useful ranges of about 0.05 to about 100 nmol, or about 0.1 to about 20 nmol, or about 1 nmol to about 10 nmol of polynucleotides per plant. In certain embodiments, about 40 to about 50 nmol of a single-stranded polynucleotide as described herein are applied. In certain embodiments, about 0.5 nmol to about 2 nmol of a dsRNA as described herein is applied. In certain embodiments, a composition containing about 0.5 to about 2.0 milligrams per milliliter, or about 0.14 milligrams per milliliter of a dsRNA (or a single-stranded 21-mer) as described herein is applied. In certain embodiments, a composition of about 0.5 to about 1.5 milligrams per milliliter of a dsRNA polynucleotide as described herein of about 50 to about 200 or more nucleotides is applied. In certain embodiments, about 1 nmol to about 5 nmol of a dsRNA as described herein is applied to a plant. In certain embodiments, the polynucleotide composition as topically applied to the plant contains at least one polynucleotide as described herein at a concentration of about 0.01 to about 10 milligrams per milliliter, or about 0.05 to about 2 milligrams per milliliter, or about 0.1 to about 2 milligrams per milliliter. Very large plants, trees, or vines can require correspondingly larger amounts of polynucleotides. When using long dsRNA molecules that can be processed into multiple oligonucleotides (e.g., multiple triggers encoded by a single recombinant DNA molecule as disclosed herein) lower concentrations can be used. Non-limiting examples of effective polynucleotide treatment regimes include a treatment of between about 0.1 to about 1 nmol of polynucleotide molecule per plant, or between about 1 nmol to about 10 nmol of polynucleotide molecule per plant, or between about 10 nmol to about 100 nmol of polynucleotide molecule per plant.

[0109] Crops of useful plants that may be protected according to this aspect of the invention include crop plants and/or ornamental plants. Crop plants include for example, members of the Solanaceae, Brassicacae, Labiatae and Fabaceae families, and flowering ornamental plants include in particular members of the Rubiaceae. In some embodiments, the crop a plant in the family Brassicaceae, including a Brassica species selected from the group consisting of B. napus, B. juncea, B. carinata, B. rapa, B. oleracea, B. rupestris, B. septiceps, B. nigra, B. narinosa, B. perviridus, B. tournefortii, and B. fructiculosas. In other embodiments, the plant is selected from the group consisting of Glycine max, Linum usitatissimum, Zea mays, Carthamus tinctorius, Helianthus annuus, Nicotiana tabacum, Arabidopsis thaliana, Betholettia excelsa, Ricinus communis, Cocus nucifera, Coriandrum sativum, Gossypium spp., Arachis hypogaea, Simmondsia chinensis, Solanum tuberosum, Elaeis guineensis, Olea europaea, Oryza sativa, Cucurbita maxim, Hordeum vulgare, and Triticum aestivum. In some embodiments the following ornamental plants may be protected against attack/infestation from flea beetles: Gardenia spp, Rothmannia spp, and ornamental Brassicacae.

[0110] Crops of useful plants are to be understood as including those which are/have been made tolerant to herbicides or classes of herbicide and/or insecticide or classes of insecticide, and/or which have acquired a so-called “output” trait (e.g. improved storage staibilty, higher nutritional value, improved yield etc.) by conventional plant-breeding or genetic engineering methods. Examples of useful plants that have been rendered tolerant to herbicides by genetic engineering methods include e.g. glyphosate- and glufosinate resistant varieties available under the trade names RoundupReady® and LibertyLink®, (e.g. RoundupReady® Canola and LibertyLink® Canola). An example of a crop that has been rendered tolerant to imidazolininone herbicides (e.g. imazamox) by conventional breeding methods includes Clearfield® summer rape (canola). Thus useful plants include those where the plants are transgenic, or where the plants have inherited a trait as a consequence of the introduction at least one transgene in their lineage.

[0111] As shown herein, the dsRNA molecules of the invention are surprisingly effective at controlling insects, namely flea beetles, in the Alticini tribe. The control of such insects is particularly important where it has been found that such insects exhibit resistance (or tolerance) to the insecticides that have hitherto been used for their control. Thus the methods of the invention not only have applicability against Alticini tribe members that are sensitive to insecticides other than the compositions of the invention, but also against Alticini tribe members that are resistant to insecticides, in particular Alticini tribe members resistant to pyrethroid and/or organophosphate pesticides.

[0112] In preferred embodiments of the aspects of the invention discussed herein, a composition of the invention is used to control insects of the tribe Alticini, commonly known as flea beetles.

[0113] Adult flea beetles damage plants by chewing numerous small holes in the leaves. Flea beetles can be the most detrimental to seedlings, however when the populations are high, flea beetles can defoliate and kill entire established plants. Flea beetles may also transmit viral and bacterial diseases which further affect the health and yield of the crop plants. Thus, in further aspects the invention provides methods of increasing the yield from crops of useful plants that are under attack by flea beetles from the tribe Alticini and/or maintaining yield or reducing yield loss from crops of useful plants that susceptible to attack by flea beetles of the tribe Alticini.

[0114] The methods of the present invention may be used to control all insects of the tribe Alticini. In some embodiments, the methods of the present invention may be used to control all insects of a genus selected from the group consisting of the genera Altica, Anthobiodes, Aphthona, Aphthonaltica, Aphthonoides, Apteopeda, Argopistes, Argopus, Arrhenocoela, Batophila, Blepharida, Chaetocnema, Clitea, Crepidodera, Derocrepis, Dibolia, Disonycha, Epitrix, Hermipyxis, Hermaeophaga, Hespera, Hippuriphila, Horaia, Hyphasis, Lipromima, Liprus, Longitarsus, Luperomorpha, Lythraria, Manobia, Mantura, Meishania, Minota, Mniophila, Neicrepidodera, Nonarthra, Novofoudrasia, Ochrosis, Oedionychis, Oglobinia, Omeisphaera, Ophrida, Orestia, Paragopus, Pentamesa, Philopona, Phygasia, Phyllotreta, Podagrica, Podagricomela, Podontia, Pseudodera, Psylliodes, Sangariola, Sinaltica, Sphaeroderma, Systena, Trachyaphthona, Xuthea, and Zipangia. In particular, methods of the invention may be used in the control of the following species: Altica ambiens (alder flea beetle), Altica canadensis (prairie flea beetle), Altica chalybaea (grape flea beetle), Altica prasina (poplar flea beetle), Altica rosae (rose flea beetle), Altica sylvia (blueberry flea beetle), Altica ulmi (elm flea beetle), Chaetocnema pulicaria (corn flea beetle), Chaetocnema conofinis (sweet potato flea beetle), Epitrix cucumeris (potato flea beetle), Systena blanda (palestripped flea beetle), and Systena frontalis (redheaded flea beetle). In embodiments, the insect is a species selected from the group consisting of Phyllotreta armoraciae (horseradish flea beetle), Phyllotreta cruciferae (canola flea beetle), Phyllotreta pusilla (western black flea beetle), Phyllotreta nemorum (striped turnip flea beetle), Phyllotreta atra (turnip flea beetle), Phyllotreta robusta (garden flea beetle), Phyllotreta striolata (striped flea beetle), Phyllotreta undulata, Psylliodes chrysocephala, and Psylliodes punctulata (hop flea beetle). In further embodiments the methods of the invention will be used to control P. chrysocephala, P. nemorum, and P. striolata.

[0115] Methods include those developed for specific flea beetle pests for a given plant, e.g., wherein the plant is a potato plant and the insect is Epitrix cucumeris (potato flea beetle). In some embodiments, specific target genes are identified as targets for RNAi-mediated control in a given insect species. Various embodiments of the method include those wherein (a) the insect is Phyllotreta armoraciae and the target gene has a DNA sequence selected from the group consisting of SEQ ID NOs:1-17; (b) the insect is Psylliodes chrysocephala and the target gene has a DNA sequence selected from the group consisting of SEQ ID NOs: 18-34; (c) the insect is Phyllotreta nemorum and the target gene has a DNA sequence selected from the group consisting of SEQ ID NOs: 35-51; (d) the insect is Phyllotreta striolata and the target gene has a DNA sequence selected from the group consisting of SEQ ID NOs: 52-68; (e) the insect is Phyllotreta atra and the target gene has a DNA sequence selected from the group consisting of SEQ ID NOs: 69-85; or (f) the insect is Phyllotreta cruciferae and the target gene has a DNA sequence selected from the group consisting of SEQ ID NOs: 86-102.

[0116] The term “agrochemically active ingredient” refers to chemicals and/or biological compositions, such as those described herein, which are effective in killing, preventing, or controlling the growth of undesirable pests, such as, plants, insects, mice, microorganism, algae, fungi, bacteria, and the like (such as pesticidally active ingredients). An interfering RNA molecule of the invention is an agrochemically active ingredient.

[0117] An “agriculturally acceptable carrier” includes adjuvants, mixers, enhancers, etc. beneficial for application of an active ingredient, such as an interfering RNA molecule of the invention. Suitable carriers should not be phytotoxic to valuable crops, particularly at the concentrations employed in applying the compositions in the presence of crops, and should not react chemically with the compounds of the active ingredient herein, namely an interfering RNA of the invention, or other composition ingredients. Such mixtures can be designed for application directly to crops, or can be concentrates or formulations which are normally diluted with additional carriers and adjuvants before application. They may include inert or active components and can be solids, such as, for example, dusts, granules, water dispersible granules, or wettable powders, or liquids, such as, for example, emulsifiable concentrates, solutions, emulsions or suspensions. Suitable agricultural carriers may include liquid carriers, for example water, toluene, xylene, petroleum naphtha, crop oil, acetone, methyl ethyl ketone, cyclohexanone, trichloroethylene, perchloroethylene, ethyl acetate, amyl acetate, butyl acetate, propylene glycol monomethyl ether and diethylene glycol monomethyl ether, methanol, ethanol, isopropanol, amyl alcohol, ethylene glycol, propylene glycol, glycerine, and the like. Water is generally the carrier of choice for the dilution of concentrates. Suitable solid carriers may include talc, pyrophyllite clay, silica, attapulgus clay, kieselguhr, chalk, diatomaceous earth, lime, calcium carbonate, bentonire clay, Fuller's earth, cotton seed hulls, wheat flour, soybean flour, pumice, wood flour, walnut shell flour, lignin, and the like.

[0118] It is recognized that the polynucleotides comprising sequences encoding the silencing element can be used to transform organisms to provide for host organism production of these components, and further used for subsequent application of the host organism to the environment of the target pest(s). In this manner, the combination of polynucleotides encoding the silencing element may be introduced via a suitable vector into a microbial host, and said host applied to the environment, or to plants or animals.

[0119] For the present invention, an agriculturally acceptable carrier may also include non-pathogenic, attenuated strains of microorganisms, which carry the insect control agent, namely an interfering RNA molecule of the invention. In this case, the microorganisms carrying the interfering RNA may also be referred to as insect control agents. The microorganisms may be engineered to express a nucleotide sequence of a target gene to produce interfering RNA molecules comprising RNA sequences homologous or complementary to RNA sequences typically found within the cells of an insect. Exposure of the insects to the microorganisms result in ingestion of the microorganisms and down-regulation of expression of target genes mediated directly or indirectly by the interfering RNA molecules or fragments or derivatives thereof.

[0120] Further, microbial hosts that are known to occupy the “phytosphere” (phylloplane, phyllosphere, rhizosphere, and/or rhizoplana) of one or more crops of interest may be selected. These microorganisms are selected so as to be capable of successfully competing in the particular environment with the wild-type microorganisms, provide for stable maintenance and expression of the sequences encoding the interfering RNA molecule of the invention, and desirably, provide for improved protection of the components from environmental degradation and inactivation.

[0121] Such microorganisms include bacteria, algae, and fungi. Of particular interest are microorganisms such as bacteria, e.g., Pseudomonas, Erwinia, Serratia, Klebsiella, Escherichia, Xanthomonas, Streptomyces, Rhizobium, Rhodopseudomonas, Methylius, Agrobacterium, Acetobacter, Lactobacillus, Arthrobacter, Azotobacter, Leuconostoc, and Alcaligenes; fungi, particularly yeast, e.g., Saccharomyces, Cryptococcus, Kluyveromyces, Sporobolomyces, Rhodotorula, and Aureobasidium. Of particular interest are such phytosphere bacterial species as Pseudomonas syringae, Pseudomonas fluorescens, Serratia marcescens, Acetobacter xylinum, Agrobacteria spp., Rhodopseudomonas spheroides, Xanthomonas campestris, Rhizobium melioti, Alcaligenes entrophus, Clavibacter xyli and Azotobacter vinlandir, and phytosphere yeast species such as Rhodotorula rubra, R. glutinis, R. marina, R. aurantiaca, Cryptococcus albidus, C. diffluens, C. laurentii, Saccharomyces rosei, S. pretoriensis, S. cerevisiae, Sporobolomyces rosues, S. odorus, Kluyveromyces veronae, and Aureobasidium pollulans.

[0122] A number of ways are available for introducing the polynucleotide comprising the silencing element into the microbial host under conditions that allow for stable maintenance and expression of such nucleotide encoding sequences. For example, expression cassettes can be constructed which include the nucleotide constructs of interest operably linked with the transcriptional and translational regulatory signals for expression of the nucleotide constructs, and a nucleotide sequence homologous with a sequence in the host organism, whereby integration will occur, and/or a replication system that is functional in the host, whereby integration or stable maintenance will occur.

[0123] Transcriptional and translational regulatory signals include, but are not limited to, promoters, transcriptional initiation start sites, operators, activators, enhancers, other regulatory elements, ribosomal binding sites, an initiation codon, termination signals, and the like. Methods for the production of expression constructs comprising such regulatory signals are well known in the art; see for example Sambrook et al. (2000); Molecular Cloning: A Laboratory Manual (3rd ed.; Cold Spring Harbor Laboratory Press, Plainview, N.Y.); Davis et al. (1980) Advanced Bacterial Genetics (Cold Spring Harbor Laboratory, Cold Spring Harbor, N.Y.); and the references cited therein.

[0124] Suitable host cells include the prokaryotes and the lower eukaryotes, such as fungi. Illustrative prokaryotes, both Gram-negative and Gram-positive, include Enterobacteriaceae, such as Escherichia, Erwinia, Shigella, Salmonella, and Proteus; Bacillaceae; Rhizobiceae, such as Rhizobium; Spirillaceae, such as photobacterium, Zymomonas, Serratia, Aeromonas, Vibrio, Desulfovibrio, Spirillum; Lactobacillaceae; Pseudomonadaceae, such as Pseudomonas and Acetobacter; Azotobacteraceae and Nitrobacteraceae. Among eukaryotes are fungi, such as Phycomycetes and Ascomycetes, which includes yeast such as Saccharomyces and Schizosaccharomyces; and Basidiomycetes yeast, such as Rhodotorula, Aureobasidium, Sporobolomyces, and the like.

[0125] Characteristics of particular interest in selecting a host cell for purposes of the invention include ease of introducing the coding sequence into the host, availability of expression systems, efficiency of expression, RNA stability in the host, and the presence of auxiliary genetic capabilities. Characteristics of interest for use as a pesticide microcapsule include protective qualities, such as thick cell walls, pigmentation, and intracellular packaging or formation of inclusion bodies; leaf affinity; lack of mammalian toxicity; attractiveness to pests for ingestion; and the like. Other considerations include ease of formulation and handling, economics, storage stability, and the like.

[0126] Host organisms of particular interest include yeast, such as Rhodotorula spp., Aureobasidium spp., Saccharomyces spp., and Sporobolomyces spp., phylloplane organisms such as Pseudomonas spp., Erwinia spp., and Flavobacterium spp., and other such organisms, including Pseudomonas aeruginosa, Pseudomonas fluorescens, Saccharomyces cerevisiae, Bacillus thuringiensis, Escherichia coli, Bacillus subtilis, and the like.

[0127] The sequences encoding the interfering RNA molecules encompassed by the invention can be introduced into microorganisms that multiply on plants (epiphytes) to deliver these components to potential target pests. Epiphytes, for example, can be gram-positive or gram-negative bacteria.

[0128] An interfering RNA molecule of the invention can be fermented in a bacterial host and the resulting bacteria processed, and used as a microbial spray in the same manner that Bacillus thuringiensis strains have been used as insecticidal sprays. Any suitable microorganism can be used for this purpose. Pseudomonas spp. have been used to express Bacillus thuringiensis endotoxins as encapsulated proteins and the resulting cells processed and sprayed as an insecticide (Gaertner et al. 1993. Advanced Engineered Pesticides, ed. L. Kim (Marcel Decker, Inc.). E. coli is also well-known in the art for expressing molecules of interest as part during a fermentation process. In some embodiments, the resulting bacteria is processed by heat inactivation. In some embodiments, heat inactivation kills the bacteria but does not degrade the produced RNA molecules. The resulting compositions may then be formulated in accordance with conventional techniques for application to the environment hosting a target pest, e.g., soil, water, and foliage of plants.

[0129] Alternatively, the components of the invention are produced by introducing heterologous genes into a cellular host. Expression of the heterologous sequences results, directly or indirectly, in the intracellular production of the silencing element. These compositions may then be formulated in accordance with conventional techniques for application to the environment hosting a target pest, e.g., soil, water, and foliage of plants.

[0130] The transformed microorganisms carrying an interfering RNA molecule of the invention may also be referred to as insect control agents. The microorganisms may be engineered to express a nucleotide sequence of a target gene to produce interfering RNA molecules comprising RNA sequences homologous or complementary to RNA sequences typically found within the cells of an insect. Exposure of the insects to the microorganisms result in ingestion of the microorganisms and down-regulation of expression of target genes mediated directly or indirectly by the interfering RNA molecules or fragments or derivatives thereof.

[0131] In the present invention, a transformed microorganism can be formulated with an acceptable carrier into separate or combined compositions that are, for example, a suspension, a solution, an emulsion, a dusting powder, a dispersible granule, a wettable powder, and an emulsifiable concentrate, an aerosol, an impregnated granule, an adjuvant, a coatable paste, and also encapsulations in, for example, polymer substances.

[0132] Such compositions disclosed above may be obtained by the addition of a surface-active agent, an inert carrier, a preservative, a humectant, a feeding stimulant, an attractant, an encapsulating agent, a binder, an emulsifier, a dye, a UV protectant, a buffer, a flow agent or fertilizers, micronutrient donors, or other preparations that influence plant growth. One or more agrochemicals including, but not limited to, herbicides, insecticides, fungicides, bactericides, nematicides, molluscicides, acaracides, plant growth regulators, harvest aids, and fertilizers, can be combined with carriers, surfactants or adjuvants customarily employed in the art of formulation or other components to facilitate product handling and application for particular target pests. Suitable carriers and adjuvants can be solid or liquid and correspond to the substances ordinarily employed in formulation technology, e.g., natural or regenerated mineral substances, solvents, dispersants, wetting agents, tackifiers, binders, or fertilizers. The active ingredients of the present invention (i.e., at least one interfering RNA molecule) are normally applied in the form of compositions and can be applied to the crop area, plant, or seed to be treated. For example, the compositions may be applied to grain in preparation for or during storage in a grain bin or silo, etc. The compositions may be applied simultaneously or in succession with other compounds. Methods of applying an active ingredient or a composition that contains at least one interfering RNA molecule include, but are not limited to, foliar application, seed coating, and soil application. The number of applications and the rate of application depend on the intensity of infestation by the corresponding pest.

[0133] The compositions comprising an interfering RNA molecule of the invention can be in a suitable form for direct application or as a concentrate of primary composition that requires dilution with a suitable quantity of water or other dilutant before application. The compositions (including the transformed microorganisms) can be applied to the environment of an insect pest such as a flea beetle, for example an insect species selected from the group consisting of Phyllotreta armoraciae (horseradish flea beetle), Phyllotreta cruciferae (canola flea beetle), Phyllotreta pusilla (western black flea beetle), Phyllotreta nemorum (striped turnip flea beetle), Phyllotreta atra (turnip flea beetle), Phyllotreta robusta (garden flea beetle), Phyllotreta striolata (striped flea beetle), Phyllotreta undulata, Psylliodes chrysocephala, or Psylliodes punctulata (hop flea beetle), by, for example, spraying, atomizing, dusting, scattering, coating or pouring, introducing into or on the soil, introducing into irrigation water, by seed treatment or general application or dusting at the time when the pest has begun to appear or before the appearance of pests as a protective measure. For example, the composition(s) and/or transformed microorganism(s) may be mixed with grain to protect the grain during storage. It is generally important to obtain good control of pests in the early stages of plant growth, as this is the time when the plant can be most severely damaged.

[0134] Application is of the compounds of the invention is preferably to a crop of canola plants, the locus thereof or propagation material thereof. Preferably application is to a crop of canola plants or the locus thereof, more preferably to a crop of canola plants. Application may be before infestation or when the pest is present. Application of the compounds of the invention can be performed according to any of the usual modes of application, e.g. foliar, drench, soil, in furrow etc.

[0135] The compounds of the invention may be applied in combination with an attractant. An attractant is a chemical that causes the insect to migrate towards the location of application. Suitable attractants may include glucose, saccharose, salt, glutamate (e.g. Aji-no-Moto™), and citric acid (e.g. Orobor™).

[0136] An attractant may be premixed with the compound of the invention prior to application, e.g. as a ready-mix or tank-mix, or by simultaneous application or sequential application to the plant. Suitable rates of attractants are for example 0.02 kg/ha-3 kg/ha.

[0137] The compositions can conveniently contain another insecticide if this is thought necessary. In an embodiment of the invention, the composition(s) is applied directly to the soil, at a time of planting, in granular form of a composition of a carrier and dead cells of a Bacillus strain or transformed microorganism of the invention. Another embodiment is a granular form of a composition comprising an agrochemical such as, for example, a herbicide, an insecticide, a fertilizer, in an inert carrier, and dead cells of a Bacillus strain or live or dead cells of transformed microorganisms of the invention.

[0138] In another embodiment, the interfering RNA molecules may be encapsulated in a synthetic matrix such as a polymer and applied to the surface of a host such as a plant. Ingestion of the host cells by an insect permits delivery of the insect control agents to the insect and results in down-regulation of a target gene in the host.

[0139] A composition of the invention, for example a composition comprising an interfering RNA molecule of the invention and an agriculturally acceptable carrier, may be used in conventional agricultural methods. For example, the compositions of the invention may be mixed with water and/or fertilizers and may be applied preemergence and/or postemergence to a desired locus by any means, such as airplane spray tanks, irrigation equipment, direct injection spray equipment, knapsack spray tanks, cattle dipping vats, farm equipment used in ground spraying (e.g., boom sprayers, hand sprayers), and the like. The desired locus may be soil, plants, and the like.

[0140] A composition of the invention may be applied to a seed or plant propagule in any physiological state, at any time between harvest of the seed and sowing of the seed; during or after sowing; and/or after sprouting. It is preferred that the seed or plant propagule be in a sufficiently durable state that it incurs no or minimal damage, including physical damage or biological damage, during the treatment process. A formulation may be applied to the seeds or plant propagules using conventional coating techniques and machines, such as fluidized bed techniques, the roller mill method, rotostatic seed treaters, and drum coaters.

[0141] In order to apply an active ingredient to insects of the Alticini tribe and/or crops of useful plants as required by the methods of the invention said active ingredient may be used in pure form or, more typically, formulated into a composition which includes, in addition to said active ingredient, a suitable inert diluent or carrier and optionally, a surface active agent (SFA). SFAs are chemicals which are able to modify the properties of an interface (for example, liquid/solid, liquid/air or liquid/liquid interfaces) by lowering the interfacial tension and thereby leading to changes in other properties (for example dispersion, emulsification and wetting). SFAs include non-ionic, cationic and/or anionic surfactants, as well as surfactant mixtures. Thus in further embodiments according to any aspect of the invention mentioned hereinbefore, the active ingredient will be in the form of a composition additionally comprising an agriculturally acceptable carrier or diluent.

[0142] The compositions can be chosen from a number of formulation types, including dustable powders (DP), soluble powders (SP), water soluble granules (SG), water dispersible granules (WG), wettable powders (WP), granules (GR) (slow or fast release), soluble concentrates (SL), oil miscible liquids (OL), ultra low volume liquids (UL), emulsifiable concentrates (EC), dispersible concentrates (DC), emulsions (both oil in water (EW) and water in oil (EO)), micro-emulsions (ME), suspension concentrates (SC), aerosols, fogging/smoke formulations, capsule suspensions (CS) and seed treatment formulations. The formulation type chosen in any instance will depend upon the particular purpose envisaged and the physical, chemical and biological properties of the compound of formula (I).

[0143] Dustable powders (DP) may be prepared by mixing the active ingredient with one or more solid diluents (for example natural clays, kaolin, pyrophyllite, bentonite, alumina, montmorillonite, kieselguhr, chalk, diatomaceous earths, calcium phosphates, calcium and magnesium carbonates, sulfur, lime, flours, talc and other organic and inorganic solid carriers) and mechanically grinding the mixture to a fine powder.

[0144] Soluble powders (SP) may be prepared by mixing a compound of formula (I) with one or more water-soluble inorganic salts (such as sodium bicarbonate, sodium carbonate or magnesium sulfate) or one or more water-soluble organic solids (such as a polysaccharide) and, optionally, one or more wetting agents, one or more dispersing agents or a mixture of said agents to improve water dispersibility/solubility. The mixture is then ground to a fine powder. Similar compositions may also be granulated to form water soluble granules (SG).

[0145] Wettable powders (WP) may be prepared by mixing the active ingredient with one or more solid diluents or carriers, one or more wetting agents and, preferably, one or more dispersing agents and, optionally, one or more suspending agents to facilitate the dispersion in liquids. The mixture is then ground to a fine powder. Similar compositions may also be granulated to form water dispersible granules (WG).

[0146] Granules (GR) may be formed either by granulating a mixture of the active ingredient and one or more powdered solid diluents or carriers, or from pre-formed blank granules by absorbing the active ingredient (or a solution thereof, in a suitable agent) in a porous granular material (such as pumice, attapulgite clays, fuller's earth, kieselguhr, diatomaceous earths or ground corn cobs) or by adsorbing the active ingredient (or a solution thereof, in a suitable agent) on to a hardcore material (such as sands, silicates, mineral carbonates, sulfates or phosphates) and drying if necessary. Agents which are commonly used to aid absorption or adsorption include solvents (such as aliphatic and aromatic petroleum solvents, alcohols, ethers, ketones and esters) and sticking agents (such as polyvinyl acetates, polyvinyl alcohols, dextrins, sugars and vegetable oils). One or more other additives may also be included in granules (for example an emulsifying agent, wetting agent or dispersing agent).

[0147] Dispersible Concentrates (DC) may be prepared by dissolving the active ingredient in water or an organic solvent, such as a ketone, alcohol or glycol ether. These solutions may contain a surface active agent (for example to improve water dilution or prevent crystallisation in a spray tank). Emulsifiable concentrates (EC) or oil-in-water emulsions (EW) may be prepared by dissolving the active ingredient in an organic solvent (optionally containing one or more wetting agents, one or more emulsifying agents or a mixture of said agents). Suitable organic solvents for use in ECs include aromatic hydrocarbons (such as alkylbenzenes or alkylnaphthalenes, exemplified by SOLVESSO 100, SOLVESSO 15060 and SOLVESSO 200; SOLVESSO is a Registered TradeMark), ketones (such as cyclohexanone or methylcyclohexanone) and alcohols (such as benzyl alcohol, furfuryl alcohol or butanol), N-alkylpyrrolidones (such as N-methylpyrrolidoneor N-octylpyrrolidone), dimethyl amides of fatty acids (such as C8-C10 fatty acid dimethylamide) and chlorinated hydrocarbons. An EC product may spontaneously emulsify on addition to water, to produce an emulsion with sufficient stability to allow spray application through appropriate equipment. Preparation of an EW involves obtaining a compound of formula (I) either as a liquid (if it is not a liquid at room temperature, it may be melted at a reasonable temperature, typically below 70° C.) or in solution (by dissolving it in an appropriate solvent) and then emulsifiying the resultant liquid or solution into water containing one or more SFAs, under high shear, to produce an emulsion. Suitable solvents for use in EW s include vegetable oils, chlorinated hydrocarbons (such as chlorobenzenes), aromatic solvents (such as alkylbenzenes or alkylnaphthalenes) and other appropriate organic solvents which have a low solubility in water.

[0148] Microemulsions (ME) may be prepared by mixing water with a blend of one or more solvents with one or more SF As, to produce spontaneously a thermodynamically stable isotropic liquid formulation. The active ingredient is present initially in either the water or the solvent/SPA blend. Suitable solvents for use in MEs include those hereinbefore described for use in ECs or in EWs. A ME may be either an oil-in-water or a water-in-oil system (which system is present may be determined by conductivity measurements) and may be suitable for mixing water-soluble and oil-soluble pesticides in the same formulation. A ME is suitable for dilution into water, either remaining as a microemulsion or forming a conventional oil-in-water emulsion.

[0149] Suspension concentrates (SC) may comprise aqueous or non-aqueous suspensions of finely divided insoluble solid particles the active ingredient. SCs may be prepared by ball or bead milling the solid active ingredient in a suitable medium, optionally with one or more dispersing agents, to produce a fine particle suspension of the compound. One or more wetting agents may be included in the composition and a suspending agent may be included to reduce the rate at which the particles settle. Alternatively, the active ingredient may be dry milled and added to water, containing agents hereinbefore described, to produce the desired end product.

[0150] Aerosol formulations comprise the active ingredient and a suitable propellant (for example n-butane). Active ingredients may also be dissolved or dispersed in a suitable medium (for example water or a water miscible liquid, such as n-propanol) to provide compositions for use in non-pressurized, hand-actuated spray pumps. The active ingredient may be mixed in the dry state with a pyrotechnic mixture to form a composition suitable for generating, in an enclosed space, a smoke containing the compound.

[0151] Capsule suspensions (CS) may be prepared in a manner similar to the preparation of EW formulations but with an additional polymerization stage such that an aqueous dispersion of oil droplets is obtained, in which each oil droplet is encapsulated by a polymeric shell and contains the active ingredient and, optionally, a carrier or diluent therefor. The polymeric shell may be produced by either an interfacial polycondensation reaction or by a coacervation procedure. The compositions may provide for controlled release of the compound of the active ingredient. Active ingredients may also be formulated in a biodegradable polymeric matrix to provide a slow, controlled release of the compound. A composition may include one or more additives to improve the biological performance of the composition (for example by improving wetting, retention or distribution on surfaces; resistance to rain on treated surfaces; or uptake or mobility of the active ingredient. Such additives include surface active agents, spray additives based on oils, for example certain mineral oils, natural plant oils (such as soy bean and rape seed oil) and/or modified plant oils (e.g. esterified plant oils), and blends of these with other bio-enhancing adjuvants (ingredients which may aid or modify the action of the active ingredient. Where the active ingredient described herein is employed in methods of protecting crops of useful plants, methods of enhancing/maintaining yield and/or methods of increasing/maintaining pollination in crops of useful plants, it is preferred that said active ingredient (or compositions containing such active ingredient) is applied to the crop of useful plants at the flower-bud stage. In particular for crops of useful plants wherein said plants have yellow flowers, (e.g. oilseed rape, mustard etc.) it is preferred that the application occurs at the green to yellow bud stage.

[0152] Wetting agents, dispersing agents and emulsifying agents may be surface SFAs of the cationic, anionic, amphoteric or non-ionic type. Suitable SFAs of the cationic type include quaternary ammonium compounds (for example cetyltrimethyl ammonium bromide), imidazolines and amine salts.

[0153] Suitable anionic SFAs include alkali metals salts of fatty acids, salts of aliphatic monoesters of sulfuric acid (for example sodium lauryl sulfate), salts of sulfonated aromatic compounds (for example sodium dodecylbenzenesulfonate, calcium dodecylbenzenesulfonate, butylnaphthalene sulfonate and mixtures of sodium di-isopropyl- and tri-isopropyl-naphthalene sulfonates), ether sulfates, alcohol ether sulfates (for example sodium laureth-3-sulfate), ether carboxylates (for example sodium laureth-3-carboxylate), phosphate esters (products from the reaction between one or more fatty alcohols and phosphoric acid (predominately mono-esters) or phosphorus pentoxide (predominately di-esters), for example the reaction between lauryl alcohol and tetraphosphoric acid; additionally these products may be ethoxylated), sulfosuccinamates, paraffin or olefine sulfonates, taurates and lignosulfonates.

[0154] Suitable SFAs of the amphoteric type include betaines, propionates and glycinates.

[0155] Suitable SFAs of the non-ionic type include condensation products of alkylene oxides, such as ethylene oxide, propylene oxide, butylene oxide or mixtures thereof, with fatty alcohols (such as oleyl alcohol or cetyl alcohol) or with alkylphenols (such as octylphenol, nonylphenol or octylcresol); partial esters derived from long chain fatty acids or hexitol anhydrides; condensation products of said partial esters with ethylene oxide; block polymers (comprising ethylene oxide and propylene oxide); alkanolamides; simple esters (for example fatty acid polyethylene glycol esters); amine oxides (for example lauryl dimethyl amine oxide); and lecithins.

[0156] Suitable suspending agents include hydrophilic colloids (such as polysaccharides, polyvinylpyrrolidone or sodium carboxymethylcellulose) and swelling clays (such as bentonite or attapulgite).

[0157] A compound of the invention may be applied by any of the known means of applying pesticidal compounds. For example, it may be applied, formulated or unformulated, to the pests or to a locus of the pests (such as a habitat of the pests, or a growing plant liable to infestation by the pests) or to any part of the plant, including the foliage, stems, branches or roots, to the seed before it is planted or to other media in which plants are growing or are to be planted (such as soil surrounding the roots, the soil generally, paddy water or hydroponic culture systems), directly or it may be sprayed on, dusted on, applied by dipping, applied as a cream or paste formulation, applied as a vapor or applied through distribution or incorporation of a composition (such as a granular composition or a composition packed in a water-soluble bag) in soil or an aqueous environment.

[0158] A compound of the invention may also be injected into plants or sprayed onto vegetation using electrodynamic spraying techniques or other low volume methods, or applied by land or aerial irrigation systems.

[0159] Compositions for use as aqueous preparations (aqueous solutions or dispersions) are generally supplied in the form of a concentrate containing a high proportion of the active ingredient, the concentrate being added to water before use. These concentrates, which may include DCs, SCs, ECs, EWs, MEs, SGs, SPs, WPs, WGs and CSs, are often required to withstand storage for prolonged periods and, after such storage, to be capable of addition to water to form aqueous preparations which remain homogeneous for a sufficient time to enable them to be applied by conventional spray equipment. Such aqueous preparations may contain varying amounts of a compound of the invention (for example 0.0001 to 10%, by weight) depending upon the purpose for which they are to be used.

[0160] A compound of the invention may be used in mixtures with fertilizers (for example nitrogen-, potassium- or phosphorus-containing fertilizers). Suitable formulation types include granules of fertilizer. The mixtures preferably contain up to 25% by weight of the compound of the invention.

[0161] The invention therefore also provides a fertilizer composition comprising a fertilizer and a compound of the invention.

[0162] The compositions of this invention may contain other compounds having biological activity, for example micronutrients or compounds having fungicidal activity or which possess plant growth regulating, herbicidal, insecticidal, nematicidal or acaricidal activity.

[0163] The compound of the invention may be the sole active ingredient of the composition or it may be admixed with one or more additional active ingredients such as a pesticide, fungicide, synergist, herbicide or plant growth regulator where appropriate. An additional active ingredient may: provide a composition having a broader spectrum of activity or increased persistence at a locus; synergize the activity or complement the activity (for example by increasing the speed of effect or overcoming repellency) of the compound of the invention; or help to overcome or prevent the development of resistance to individual components.

[0164] Compositions of the invention include those prepared by premixing prior to application, e.g. as a readymix or tankmix, or by simultaneous application or sequential application to the plant.

[0165] In some embodiments, an acceptable agricultural carrier is a formulation useful for applying the composition comprising the interfering RNA molecule to a plant or seed. In some embodiments, the interfering RNA molecules are stabilized against degradation because of their double stranded nature and the introduction of Dnase/Rnase inhibitors. For example, dsRNA or siRNA can be stabilized by including thymidine or uridine nucleotide 3′ overhangs. The dsRNA or siRNA contained in the compositions of the invention can be chemically synthesized at industrial scale in large amounts. Methods available would be through chemical synthesis or through the use of a biological agent.

[0166] In other embodiments the formulation comprises a transfection promoting agent. In other embodiments, the transfection promoting agent is a lipid-containing compound. In further embodiments, the lipid-containing compound is selected from the group consisting of; Lipofectamine, Cellfectin, DMRIE-C, DOTAP and Lipofectin. In another embodiment, the lipid-containing compound is a Tris cationic lipid.

[0167] In some embodiments, the formulation further comprises a nucleic acid condensing agent. The nucleic acid condensing agent can be any such compound known in the art. Examples of nucleic acid condensing agents include, but are not limited to, spermidine (N-[3-aminopropyl]-1,4-butanediamine), protamine sulphate, poly-lysine as well as other positively charged peptides. In some embodiments, the nucleic acid condensing agent is spermidine or protamine sulfate.

[0168] In still further embodiments, the formulation further comprises buffered sucrose or phosphate buffered saline.

[0169] “Expression cassette” as used herein means a nucleic acid sequence capable of directing expression of a particular nucleic acid sequence in an appropriate host cell, comprising a promoter operably linked to the nucleic acid sequence of interest which is operably linked to termination signal sequences. It also typically comprises sequences required for proper translation of the nucleic acid sequence. The expression cassette comprising the nucleic acid sequence of interest may be chimeric, meaning that at least one of its components is heterologous with respect to at least one of its other components. The expression cassette may also be one that is naturally occurring but has been obtained in a recombinant form useful for heterologous expression. Typically, however, the expression cassette is heterologous with respect to the host, i.e., the particular nucleic acid sequence of the expression cassette does not occur naturally in the host cell and must have been introduced into the host cell or an ancestor of the host cell by a transformation event. The expression of the nucleic acid sequence in the expression cassette may be under the control of, for example, a constitutive promoter or of an inducible promoter that initiates transcription only when the host cell is exposed to some particular external stimulus. In the case of a multicellular organism, such as a plant, the promoter can also be specific to a particular tissue, or organ, or stage of development.

[0170] A “gene” is a defined region that is located within a genome and that, besides the aforementioned coding sequence, comprises other, primarily regulatory nucleic acid sequences responsible for the control of the expression, that is to say the transcription and translation, of the coding portion. A gene may also comprise other 5′ and 3′ untranslated sequences and termination sequences. Further elements that may be present are, for example, introns.

[0171] As used herein, the term “grower” means a person or entity that is engaged in agriculture, raising living organisms, such as crop plants, for example canola, for food, feed or raw materials.

[0172] A “heterologous” nucleic acid sequence is a nucleic acid sequence not naturally associated with a host cell into which it is introduced, including non-naturally occurring multiple copies of a naturally occurring nucleic acid sequence.

[0173] A “homologous” nucleic acid sequence is a nucleic acid sequence naturally associated with a host cell into which it is introduced.

[0174] “Insecticidal” is defined as a toxic biological activity capable of controlling insects, preferably by killing them.

[0175] An “isolated” nucleic acid molecule or nucleotide sequence or nucleic acid construct or dsRNA molecule or protein of the invention is generally exists apart from its native environment and is therefore not a product of nature. An isolated nucleic acid molecule or nucleotide sequence or nucleic acid construct or dsRNA molecule or protein may exist in a purified form or may exist in a non-native environment such as, for example, a recombinant host or host cell such as a transgenic plant or transgenic plant cell.

[0176] In the context of the invention, a number in front of the suffix “mer” indicates a specified number of subunits. When applied to RNA or DNA, this specifies the number of bases in the molecule. For example, a 19 nucleotide subsequence of an mRNA having the sequence AGUCGUGUUGGUCCUCGGG is a “19-mer” of SEQ ID NO: 506.

[0177] A “plant” is any plant at any stage of development, particularly a seed plant.

[0178] A “plant cell” is a structural and physiological unit of a plant, comprising a protoplast and a cell wall. The plant cell may be in the form of an isolated single cell or a cultured cell, or as a part of a higher organized unit such as, for example, plant tissue, a plant organ, or a whole plant.

[0179] “Plant cell culture” means cultures of plant units such as, for example, protoplasts, cell culture cells, cells in plant tissues, pollen, pollen tubes, ovules, embryo sacs, zygotes and embryos at various stages of development.

[0180] “Plant material” refers to leaves, stems, roots, flowers or flower parts, fruits, pollen, egg cells, zygotes, seeds, cuttings, cell or tissue cultures, or any other part or product of a plant.

[0181] A “plant organ” is a distinct and visibly structured and differentiated part of a plant such as a root, stem, leaf, flower bud, or embryo.

[0182] “Plant tissue” as used herein means a group of plant cells organized into a structural and functional unit. Any tissue of a plant in planta or in culture is included. This term includes, but is not limited to, whole plants, plant organs, plant seeds, tissue culture and any groups of plant cells organized into structural and/or functional units. The use of this term in conjunction with, or in the absence of, any specific type of plant tissue as listed above or otherwise embraced by this definition is not intended to be exclusive of any other type of plant tissue.

[0183] A flea beetle “transcriptome” is a collection of all or nearly all the ribonucleic acid (RNA) transcripts in a flea beetle cell.

[0184] “Transformation” is a process for introducing heterologous nucleic acid into a host cell or organism. In particular, “transformation” means the stable integration of a DNA molecule into the genome of an organism of interest.

[0185] “Transformed/transgenic/recombinant” refer to a host organism such as a bacterium or a plant into which a heterologous nucleic acid molecule has been introduced. The nucleic acid molecule can be stably integrated into the genome of the host or the nucleic acid molecule can also be present as an extrachromosomal molecule. Such an extrachromosomal molecule can be auto-replicating. Transformed cells, tissues, or plants are understood to encompass not only the end product of a transformation process, but also transgenic progeny thereof. A “non-transformed”, “non-transgenic”, or “non-recombinant” host refers to a wild-type organism, e.g., a bacterium or plant, which does not contain the heterologous nucleic acid molecule.

[0186] The nomenclature used herein for DNA or RNA bases and amino acids is as set forth in 37 C.F.R. § 1.822.

[0187] The invention is based on the unexpected discovery that double stranded RNA (dsRNA) or small interfering RNAs (siRNA) designed to target a mRNA transcribable from the flea beetle genes described herein are toxic to the flea beetle pest and can be used to control flea beetle or Coleopteran infestation of a plant and impart to a transgenic plant tolerance to a flea beetle or Coleopteran infestation. Thus, in one embodiment, the invention provides a double stranded RNA (dsRNA) molecule comprising a sense strand and an antisense strand, wherein a nucleotide sequence of the antisense strand is complementary to a portion of a mRNA polynucleotide transcribable from a flea beetle gene described in the present disclosure, wherein the dsRNA molecule is toxic to a flea beetle or Coleopteran plant pest.

[0188] It is known in the art that dsRNA molecules that are not perfectly complementary to a target sequence (for example, having only 95% identity to the target gene) are effective to control Coleopteran pests (see, for example, Narva et al., U.S. Pat. No. 9,012,722). The invention provides an interfering RNA molecule comprising at least one dsRNA, where the dsRNA is a region of double-stranded RNA comprising annealed at least partially complementary strands. One strand of the dsRNA comprises a sequence of at least 19, at least 20, at least 21, at least 22, at least 23, at least 24, at least 25, at least 26, at least 27, at least 28, at least 29, at least 30, at least 35, at least 40, at least 45, at least 50, at least 55, at least 60, at least 65, at least 70, at least 75, at least 80, at least 85, at least 90, at least 95, at least 100, at least 110, at least 120, at least 130, at least 140, at least 150, at least 160, at least 170, at least 180, at least 190, at least 200, at least 210, at least 220, at least 230, at least 240, at least 250, at least 260, at least 270, at least 280, at least 290, or at least 300 contiguous nucleotides which is at least partially complementary to a target nucleotide sequence within a flea beetle target gene. The interfering RNA molecule (i) has at least 80% identity, at least 85% identity, at least 86% identity, at least 87% identity, at least 88% identity, at least 89% identity, at least 90% identity, at least 91% identity, at least 92% identity, at least 93% identity, at least 94% identity, at least 95% identity, at least 96% identity, at least 97% identity, at least 98% identity, at least 99% identity, or 100% identity, to at least a 19, at least a 20, at least a 21, at least a 22, at least a 23, at least a 24, at least a 25, at least a 26, at least a 27, at least a 28, at least a 29, at least a 30, at least a 35, at least a 40, at least a 45, at least a 50, at least a 55, at least a 60, at least a 65, at least a 70, at least a 75, at least a 80, at least a 85, at least a 90, at least a 95, at least a 100, at least a 110, at least a 120, at least a 130, at least a 140, at least a 150, at least a 160, at least a 170, at least a 180, at least a 190, at least a 200, at least a 210, at least a 220, at least a 230, at least a 240, at least a 250, at least a 260, at least a 270, at least a 280, at least a 290, or at least a 300 contiguous nucleotide fragment of SEQ ID NO: 409-612, or the complement thereof; (ii) comprises at least a 19, at least a 20, at least a 21, at least a 22, at least a 23, at least a 24, at least a 25, at least a 26, at least a 27, at least a 28, at least a 29, at least a 30, at least a 35, at least a 40, at least a 45, at least a 50, at least a 55, at least a 60, at least a 65, at least a 70, at least a 75, at least a 80, at least a 85, at least a 90, at least a 95, at least a 100, at least a 110, at least a 120, at least a 130, at least a 140, at least a 150, at least a 160, at least a 170, at least a 180, at least a 190, at least a 200, at least a 210, at least a 220, at least a 230, at least a 240, at least a 250, at least a 260, at least a 270, at least a 280, at least a 290, or at least a 300 contiguous nucleotide fragment of SEQ ID NO: 409-612, or the complement thereof; (iii) comprises at least a 19, at least a 20, at least a 21, at least a 22, at least a 23, at least a 24, at least a 25, at least a 26, at least a 27, at least a 28, at least a 29, at least a 30, at least a 35, at least a 40, at least a 45, at least a 50, at least a 55, at least a 60, at least a 65, at least a 70, at least a 75, at least a 80, at least a 85, at least a 90, at least a 95, at least a 100, at least a 110, at least a 120, at least a 130, at least a 140, at least a 150, at least a 160, at least a 170, at least a 180, at least a 190, at least a 200, at least a 210, at least a 220, at least a 230, at least a 240, at least a 250, at least a 260, at least a 270, at least a 280, at least a 290, or at least a 300 contiguous nucleotide fragment of a nucleotide sequence encoding an amino acid sequence encoded by SEQ ID NO: 409-612, or the complement thereof, or (iv) can hybridize under stringent conditions to a polynucleotide selected from the group consisting of SEQ ID NO: 409-612, and the complements thereof, wherein the interfering RNA molecule has insecticidal activity on a Coleopteran plant pest, for example a flea beetle insect.

[0189] In some embodiments, the interfering RNA molecule comprises at least two dsRNAs, wherein each dsRNA comprises a sequence of nucleotides which is at least partially complementary to a target nucleotide sequence within the target gene. In some embodiments, each of the dsRNAs comprise a different sequence of nucleotides which is complementary to a different target nucleotide sequence within the target gene. In other embodiments, each of the dsRNAs comprise a different sequence of nucleotides which is complementary to a target nucleotide sequence within two different target genes.

[0190] In some embodiments, the interfering RNA molecule comprises a dsRNA that can comprise, consist essentially of or consist of from at least 18 to about 25 consecutive nucleotides (e.g. 18, 19, 20, 21, 22, 23, 24, 25, 26, 27, 28, or 29) to at least about 300 consecutive nucleotides. Additional nucleotides can be added at the 3′ end, the 5′ end or both the 3′ and 5′ ends to facilitate manipulation of the dsRNA molecule but that do not materially affect the basic characteristics or function of the dsRNA molecule in RNA interference (RNAi).

[0191] In some embodiments, the interfering RNA molecule comprises a dsRNA which comprises an antisense strand that is complementary to at least 19, at least 20, at least 21, at least 22, at least 23, at least 24, at least 25, at least 26, at least 27, at least 28, at least 29, at least 30, at least 35, at least 40, at least 45, at least 50, at least 55, at least 60, at least 65, at least 70, at least 75, at least 80, at least 85, at least 90, at least 95, at least 100, at least 110, at least 120, at least 130, at least 140, at least 150, at least 160, at least 170, at least 180, at least 190, at least 200, at least 210, at least 220, at least 230, at least 240, at least 250, at least 260, at least 270, at least 280, at least 290, or at least 300 consecutive nucleotides of SEQ ID NO: 409-612, or the complement thereof. In other embodiments, the portion of dsRNA comprises, consists essentially of or consists of at least from 19, 20 or 21 consecutive nucleotides to at least 19, at least 20, at least 21, at least 22, at least 23, at least 24, at least 25, at least 26, at least 27, at least 28, at least 29, at least 30, at least 35, at least 40, at least 45, at least 50, at least 55, at least 60, at least 65, at least 70, at least 75, at least 80, at least 85, at least 90, at least 95, at least 100, at least 110, at least 120, at least 130, at least 140, at least 150, at least 160, at least 170, at least 180, at least 190, at least 200, at least 210, at least 220, at least 230, at least 240, at least 250, at least 260, at least 270, at least 280, at least 290, or at least 300 consecutive nucleotides of SEQ ID NO: 409-612, or the complement thereof.

[0192] In other embodiments, an interfering RNA molecule of the invention comprises a dsRNA which comprises, consists essentially of or consists of any 21-mer subsequence of SEQ ID NO: 409-510 consisting of N to N+20 nucleotides, or any complement thereof. For example, an interfering RNA molecule of the invention comprises a dsRNA which comprises, consist essentially of or consists of any 21-mer subsequence of SEQ ID NO: 409, wherein N is nucleotide 1 to nucleotide 784 of SEQ ID NO: 409, or any complement thereof. In other words, the portion of the mRNA that is targeted comprises any of the 784 21 consecutive nucleotide subsequences i.e. 21-mers) of SEQ ID NO: 409, or any of their complementing sequences. It will be recognized that these 784 21 consecutive nucleotide subsequences include all possible 21 consecutive nucleotide subsequences from SEQ ID NO: 409 and from SEQ ID NO: 511, and their complements, as SEQ ID NO's 409 and 511 are all to the same target, namely Pa1, which also may be referred to as a P. armoraciae ortholog of Rpn12. It will similarly be recognized that all 21-mer subsequences of SEQ ID NO: 409-510, and all complement subsequences thereof, include all possible 21 consecutive nucleotide subsequences of SEQ ID NO: 511-612, and the complement subsequences thereof.

[0193] Similarly, an interfering RNA molecule of the invention comprises a dsRNA which comprises, consist essentially of or consists of any 21-mer subsequence of SEQ ID NO: 410, wherein N is nucleotide 1 to nucleotide 2701 of SEQ ID NO: 2410, or any complement thereof. Another interfering RNA molecule of the invention comprises a dsRNA which comprises, consist essentially of or consists of any 21-mer subsequence of SEQ ID NO: 411, wherein N is nucleotide 1 to nucleotide 752 of SEQ ID NO: 411, or any complement thereof. Another interfering RNA molecule of the invention comprises a dsRNA which comprises, consist essentially of or consists of any 21-mer subsequence of SEQ ID NO: 412, wherein N is nucleotide 1 to nucleotide 811 of SEQ ID NO: 412, or any complement thereof. Another interfering RNA molecule of the invention comprises a dsRNA which comprises, consist essentially of or consists of any 21-mer subsequence of SEQ ID NO: 413, wherein N is nucleotide 1 to nucleotide 556 of SEQ ID NO: 413, or any complement thereof. Another interfering RNA molecule of the invention comprises a dsRNA which comprises, consist essentially of or consists of any 21-mer subsequence of SEQ ID NO: 414, wherein N is nucleotide 1 to nucleotide 442 of SEQ ID NO: 414, or any complement thereof. Another interfering RNA molecule of the invention comprises a dsRNA which comprises, consist essentially of or consists of any 21-mer subsequence of SEQ ID NO: 415, wherein N is nucleotide 1 to nucleotide 850 of SEQ ID NO: 415, or any complement thereof. Another interfering RNA molecule of the invention comprises a dsRNA which comprises, consist essentially of or consists of any 21-mer subsequence of SEQ ID NO: 416, wherein N is nucleotide 1 to nucleotide 352 of SEQ ID NO: 416, or any complement thereof. Another interfering RNA molecule of the invention comprises a dsRNA which comprises, consist essentially of or consists of any 21-mer subsequence of SEQ ID NO: 417, wherein N is nucleotide 1 to nucleotide 334 of SEQ ID NO: 417, or any complement thereof. Another interfering RNA molecule of the invention comprises a dsRNA which comprises, consist essentially of or consists of any 21-mer subsequence of SEQ ID NO: 418, wherein N is nucleotide 1 to nucleotide 355 of SEQ ID NO: 418, or any complement thereof. Another interfering RNA molecule of the invention comprises a dsRNA which comprises, consist essentially of or consists of any 21-mer subsequence of SEQ ID NO: 419, wherein N is nucleotide 1 to nucleotide 5674 of SEQ ID NO: 419, or any complement thereof. Another interfering RNA molecule of the invention comprises a dsRNA which comprises, consist essentially of or consists of any 21-mer subsequence of SEQ ID NO: 420, wherein N is nucleotide 1 to nucleotide 511 of SEQ ID NO: 420, or any complement thereof. Another interfering RNA molecule of the invention comprises a dsRNA which comprises, consist essentially of or consists of any 21-mer subsequence of SEQ ID NO: 421, wherein N is nucleotide 1 to nucleotide 388 of SEQ ID NO: 421, or any complement thereof. Another interfering RNA molecule of the invention comprises a dsRNA which comprises, consist essentially of or consists of any 21-mer subsequence of SEQ ID NO: 422, wherein N is nucleotide 1 to nucleotide 385 of SEQ ID NO: 422, or any complement thereof. Another interfering RNA molecule of the invention comprises a dsRNA which comprises, consist essentially of or consists of any 21-mer subsequence of SEQ ID NO: 423, wherein N is nucleotide 1 to nucleotide 400 of SEQ ID NO: 423, or any complement thereof. Another interfering RNA molecule of the invention comprises a dsRNA which comprises, consist essentially of or consists of any 21-mer subsequence of SEQ ID NO: 424, wherein N is nucleotide 1 to nucleotide 1702 of SEQ ID NO: 424, or any complement thereof. Another interfering RNA molecule of the invention comprises a dsRNA which comprises, consist essentially of or consists of any 21-mer subsequence of SEQ ID NO: 425, wherein N is nucleotide 1 to nucleotide 3973 of SEQ ID NO: 425, or any complement thereof. Another interfering RNA molecule of the invention comprises a dsRNA which comprises, consist essentially of or consists of any 21-mer subsequence of SEQ ID NO: 426, wherein N is nucleotide 1 to nucleotide 784 of SEQ ID NO: 426, or any complement thereof. Another interfering RNA molecule of the invention comprises a dsRNA which comprises, consist essentially of or consists of any 21-mer subsequence of SEQ ID NO: 427, wherein N is nucleotide 1 to nucleotide 436 of SEQ ID NO: 427, or any complement thereof. Another interfering RNA molecule of the invention comprises a dsRNA which comprises, consist essentially of or consists of any 21-mer subsequence of SEQ ID NO: 428, wherein N is nucleotide 1 to nucleotide 787 of SEQ ID NO: 428, or any complement thereof. Another interfering RNA molecule of the invention comprises a dsRNA which comprises, consist essentially of or consists of any 21-mer subsequence of SEQ ID NO: 429, wherein N is nucleotide 1 to nucleotide 805 of SEQ ID NO: 429, or any complement thereof. Another interfering RNA molecule of the invention comprises a dsRNA which comprises, consist essentially of or consists of any 21-mer subsequence of SEQ ID NO: 430, wherein N is nucleotide 1 to nucleotide 562 of SEQ ID NO: 430, or any complement thereof. Another interfering RNA molecule of the invention comprises a dsRNA which comprises, consist essentially of or consists of any 21-mer subsequence of SEQ ID NO: 431, wherein N is nucleotide 1 to nucleotide 439 of SEQ ID NO: 431, or any complement thereof. Another interfering RNA molecule of the invention comprises a dsRNA which comprises, consist essentially of or consists of any 21-mer subsequence of SEQ ID NO: 432, wherein N is nucleotide 1 to nucleotide 856 of SEQ ID NO: 432, or any complement thereof. Another interfering RNA molecule of the invention comprises a dsRNA which comprises, consist essentially of or consists of any 21-mer subsequence of SEQ ID NO: 433, wherein N is nucleotide 1 to nucleotide 352 of SEQ ID NO: 433, or any complement thereof. Another interfering RNA molecule of the invention comprises a dsRNA which comprises, consist essentially of or consists of any 21-mer subsequence of SEQ ID NO: 434, wherein N is nucleotide 1 to nucleotide 334 of SEQ ID NO: 434, or any complement thereof. Another interfering RNA molecule of the invention comprises a dsRNA which comprises, consist essentially of or consists of any 21-mer subsequence of SEQ ID NO: 435, wherein N is nucleotide 1 to nucleotide 355 of SEQ ID NO: 435, or any complement thereof. Another interfering RNA molecule of the invention comprises a dsRNA which comprises, consist essentially of or consists of any 21-mer subsequence of SEQ ID NO: 436, wherein N is nucleotide 1 to nucleotide 5674 of SEQ ID NO: 436, or any complement thereof. Another interfering RNA molecule of the invention comprises a dsRNA which comprises, consist essentially of or consists of any 21-mer subsequence of SEQ ID NO: 437, wherein N is nucleotide 1 to nucleotide 511 of SEQ ID NO: 437, or any complement thereof. Another interfering RNA molecule of the invention comprises a dsRNA which comprises, consist essentially of or consists of any 21-mer subsequence of SEQ ID NO: 438, wherein N is nucleotide 1 to nucleotide 388 of SEQ ID NO: 438, or any complement thereof. Another interfering RNA molecule of the invention comprises a dsRNA which comprises, consist essentially of or consists of any 21-mer subsequence of SEQ ID NO: 439, wherein N is nucleotide 1 to nucleotide 385 of SEQ ID NO: 439, or any complement thereof. Another interfering RNA molecule of the invention comprises a dsRNA which comprises, consist essentially of or consists of any 21-mer subsequence of SEQ ID NO: 440, wherein N is nucleotide 1 to nucleotide 400 of SEQ ID NO: 440, or any complement thereof. Another interfering RNA molecule of the invention comprises a dsRNA which comprises, consist essentially of or consists of any 21-mer subsequence of SEQ ID NO: 441, wherein N is nucleotide 1 to nucleotide 2047 of SEQ ID NO: 441, or any complement thereof. Another interfering RNA molecule of the invention comprises a dsRNA which comprises, consist essentially of or consists of any 21-mer subsequence of SEQ ID NO: 442, wherein N is nucleotide 1 to nucleotide 3964 of SEQ ID NO: 442, or any complement thereof. Another interfering RNA molecule of the invention comprises a dsRNA which comprises, consist essentially of or consists of any 21-mer subsequence of SEQ ID NO: 443, wherein N is nucleotide 1 to nucleotide 784 of SEQ ID NO: 443, or any complement thereof. Another interfering RNA molecule of the invention comprises a dsRNA which comprises, consist essentially of or consists of any 21-mer subsequence of SEQ ID NO: 444, wherein N is nucleotide 1 to nucleotide 436 of SEQ ID NO: 444, or any complement thereof. Another interfering RNA molecule of the invention comprises a dsRNA which comprises, consist essentially of or consists of any 21-mer subsequence of SEQ ID NO: 445, wherein N is nucleotide 1 to nucleotide 787 of SEQ ID NO: 445, or any complement thereof. Another interfering RNA molecule of the invention comprises a dsRNA which comprises, consist essentially of or consists of any 21-mer subsequence of SEQ ID NO: 446, wherein N is nucleotide 1 to nucleotide 811 of SEQ ID NO: 446, or any complement thereof. Another interfering RNA molecule of the invention comprises a dsRNA which comprises, consist essentially of or consists of any 21-mer subsequence of SEQ ID NO: 447, wherein N is nucleotide 1 to nucleotide 487 of SEQ ID NO: 447, or any complement thereof. Another interfering RNA molecule of the invention comprises a dsRNA which comprises, consist essentially of or consists of any 21-mer subsequence of SEQ ID NO: 448, wherein N is nucleotide 1 to nucleotide 406 of SEQ ID NO: 448, or any complement thereof. Another interfering RNA molecule of the invention comprises a dsRNA which comprises, consist essentially of or consists of any 21-mer subsequence of SEQ ID NO: 449, wherein N is nucleotide 1 to nucleotide 856 of SEQ ID NO: 449, or any complement thereof. Another interfering RNA molecule of the invention comprises a dsRNA which comprises, consist essentially of or consists of any 21-mer subsequence of SEQ ID NO: 450, wherein N is nucleotide 1 to nucleotide 251 of SEQ ID NO: 450, or any complement thereof. Another interfering RNA molecule of the invention comprises a dsRNA which comprises, consist essentially of or consists of any 21-mer subsequence of SEQ ID NO: 451, wherein N is nucleotide 1 to nucleotide 334 of SEQ ID NO: 451, or any complement thereof. Another interfering RNA molecule of the invention comprises a dsRNA which comprises, consist essentially of or consists of any 21-mer subsequence of SEQ ID NO: 452, wherein N is nucleotide 1 to nucleotide 355 of SEQ ID NO: 452, or any complement thereof. Another interfering RNA molecule of the invention comprises a dsRNA which comprises, consist essentially of or consists of any 21-mer subsequence of SEQ ID NO: 453, wherein N is nucleotide 1 to nucleotide 5674 of SEQ ID NO: 453, or any complement thereof. Another interfering RNA molecule of the invention comprises a dsRNA which comprises, consist essentially of or consists of any 21-mer subsequence of SEQ ID NO: 454, wherein N is nucleotide 1 to nucleotide 511 of SEQ ID NO: 454, or any complement thereof. Another interfering RNA molecule of the invention comprises a dsRNA which comprises, consist essentially of or consists of any 21-mer subsequence of SEQ ID NO: 455, wherein N is nucleotide 1 to nucleotide 388 of SEQ ID NO: 455, or any complement thereof. Another interfering RNA molecule of the invention comprises a dsRNA which comprises, consist essentially of or consists of any 21-mer subsequence of SEQ ID NO: 456, wherein N is nucleotide 1 to nucleotide 385 of SEQ ID NO: 456, or any complement thereof. Another interfering RNA molecule of the invention comprises a dsRNA which comprises, consist essentially of or consists of any 21-mer subsequence of SEQ ID NO: 457, wherein N is nucleotide 1 to nucleotide 400 of SEQ ID NO: 457, or any complement thereof. Another interfering RNA molecule of the invention comprises a dsRNA which comprises, consist essentially of or consists of any 21-mer subsequence of SEQ ID NO: 458, wherein N is nucleotide 1 to nucleotide 1189 of SEQ ID NO: 458, or any complement thereof. Another interfering RNA molecule of the invention comprises a dsRNA which comprises, consist essentially of or consists of any 21-mer subsequence of SEQ ID NO: 459, wherein N is nucleotide 1 to nucleotide 3514 of SEQ ID NO: 459, or any complement thereof. Another interfering RNA molecule of the invention comprises a dsRNA which comprises, consist essentially of or consists of any 21-mer subsequence of SEQ ID NO: 460, wherein N is nucleotide 1 to nucleotide 784 of SEQ ID NO: 460, or any complement thereof. Another interfering RNA molecule of the invention comprises a dsRNA which comprises, consist essentially of or consists of any 21-mer subsequence of SEQ ID NO: 461, wherein N is nucleotide 1 to nucleotide 436 of SEQ ID NO: 461, or any complement thereof. Another interfering RNA molecule of the invention comprises a dsRNA which comprises, consist essentially of or consists of any 21-mer subsequence of SEQ ID NO: 462, wherein N is nucleotide 1 to nucleotide 787 of SEQ ID NO: 462, or any complement thereof. Another interfering RNA molecule of the invention comprises a dsRNA which comprises, consist essentially of or consists of any 21-mer subsequence of SEQ ID NO: 463, wherein N is nucleotide 1 to nucleotide 811 of SEQ ID NO: 463, or any complement thereof. Another interfering RNA molecule of the invention comprises a dsRNA which comprises, consist essentially of or consists of any 21-mer subsequence of SEQ ID NO: 464, wherein N is nucleotide 1 to nucleotide 556 of SEQ ID NO: 464, or any complement thereof. Another interfering RNA molecule of the invention comprises a dsRNA which comprises, consist essentially of or consists of any 21-mer subsequence of SEQ ID NO: 465, wherein N is nucleotide 1 to nucleotide 439 of SEQ ID NO: 465, or any complement thereof. Another interfering RNA molecule of the invention comprises a dsRNA which comprises, consist essentially of or consists of any 21-mer subsequence of SEQ ID NO: 466, wherein N is nucleotide 1 to nucleotide 856 of SEQ ID NO: 466, or any complement thereof. Another interfering RNA molecule of the invention comprises a dsRNA which comprises, consist essentially of or consists of any 21-mer subsequence of SEQ ID NO: 467, wherein N is nucleotide 1 to nucleotide 352 of SEQ ID NO: 467, or any complement thereof. Another interfering RNA molecule of the invention comprises a dsRNA which comprises, consist essentially of or consists of any 21-mer subsequence of SEQ ID NO: 468, wherein N is nucleotide 1 to nucleotide 334 of SEQ ID NO: 468, or any complement thereof. Another interfering RNA molecule of the invention comprises a dsRNA which comprises, consist essentially of or consists of any 21-mer subsequence of SEQ ID NO: 469, wherein N is nucleotide 1 to nucleotide 355 of SEQ ID NO: 469, or any complement thereof. Another interfering RNA molecule of the invention comprises a dsRNA which comprises, consist essentially of or consists of any 21-mer subsequence of SEQ ID NO: 470, wherein N is nucleotide 1 to nucleotide 5260 of SEQ ID NO: 470, or any complement thereof. Another interfering RNA molecule of the invention comprises a dsRNA which comprises, consist essentially of or consists of any 21-mer subsequence of SEQ ID NO: 471, wherein N is nucleotide 1 to nucleotide 511 of SEQ ID NO: 471, or any complement thereof. Another interfering RNA molecule of the invention comprises a dsRNA which comprises, consist essentially of or consists of any 21-mer subsequence of SEQ ID NO: 472, wherein N is nucleotide 1 to nucleotide 388 of SEQ ID NO: 472, or any complement thereof. Another interfering RNA molecule of the invention comprises a dsRNA which comprises, consist essentially of or consists of any 21-mer subsequence of SEQ ID NO: 473, wherein N is nucleotide 1 to nucleotide 385 of SEQ ID NO: 473, or any complement thereof. Another interfering RNA molecule of the invention comprises a dsRNA which comprises, consist essentially of or consists of any 21-mer subsequence of SEQ ID NO: 474, wherein N is nucleotide 1 to nucleotide 400 of SEQ ID NO: 474, or any complement thereof. Another interfering RNA molecule of the invention comprises a dsRNA which comprises, consist essentially of or consists of any 21-mer subsequence of SEQ ID NO: 475, wherein N is nucleotide 1 to nucleotide 2044 of SEQ ID NO: 475, or any complement thereof. Another interfering RNA molecule of the invention comprises a dsRNA which comprises, consist essentially of or consists of any 21-mer subsequence of SEQ ID NO: 476, wherein N is nucleotide 1 to nucleotide 3511 of SEQ ID NO: 476, or any complement thereof. Another interfering RNA molecule of the invention comprises a dsRNA which comprises, consist essentially of or consists of any 21-mer subsequence of SEQ ID NO: 477, wherein N is nucleotide 1 to nucleotide 784 of SEQ ID NO: 477, or any complement thereof. Another interfering RNA molecule of the invention comprises a dsRNA which comprises, consist essentially of or consists of any 21-mer subsequence of SEQ ID NO: 478, wherein N is nucleotide 1 to nucleotide 412 of SEQ ID NO: 478, or any complement thereof. Another interfering RNA molecule of the invention comprises a dsRNA which comprises, consist essentially of or consists of any 21-mer subsequence of SEQ ID NO: 479, wherein N is nucleotide 1 to nucleotide 676 of SEQ ID NO: 479, or any complement thereof. Another interfering RNA molecule of the invention comprises a dsRNA which comprises, consist essentially of or consists of any 21-mer subsequence of SEQ ID NO: 480, wherein N is nucleotide 1 to nucleotide 811 of SEQ ID NO: 480, or any complement thereof. Another interfering RNA molecule of the invention comprises a dsRNA which comprises, consist essentially of or consists of any 21-mer subsequence of SEQ ID NO: 481, wherein N is nucleotide 1 to nucleotide 556 of SEQ ID NO: 481, or any complement thereof. Another interfering RNA molecule of the invention comprises a dsRNA which comprises, consist essentially of or consists of any 21-mer subsequence of SEQ ID NO: 482, wherein N is nucleotide 1 to nucleotide 439 of SEQ ID NO: 482, or any complement thereof. Another interfering RNA molecule of the invention comprises a dsRNA which comprises, consist essentially of or consists of any 21-mer subsequence of SEQ ID NO: 483, wherein N is nucleotide 1 to nucleotide 856 of SEQ ID NO: 483, or any complement thereof. Another interfering RNA molecule of the invention comprises a dsRNA which comprises, consist essentially of or consists of any 21-mer subsequence of SEQ ID NO: 484, wherein N is nucleotide 1 to nucleotide 352 of SEQ ID NO: 484, or any complement thereof. Another interfering RNA molecule of the invention comprises a dsRNA which comprises, consist essentially of or consists of any 21-mer subsequence of SEQ ID NO: 485, wherein N is nucleotide 1 to nucleotide 334 of SEQ ID NO: 485, or any complement thereof. Another interfering RNA molecule of the invention comprises a dsRNA which comprises, consist essentially of or consists of any 21-mer subsequence of SEQ ID NO: 486, wherein N is nucleotide 1 to nucleotide 361 of SEQ ID NO: 486, or any complement thereof. Another interfering RNA molecule of the invention comprises a dsRNA which comprises, consist essentially of or consists of any 21-mer subsequence of SEQ ID NO: 487, wherein N is nucleotide 1 to nucleotide 5668 of SEQ ID NO: 487, or any complement thereof. Another interfering RNA molecule of the invention comprises a dsRNA which comprises, consist essentially of or consists of any 21-mer subsequence of SEQ ID NO: 488, wherein N is nucleotide 1 to nucleotide 457 of SEQ ID NO: 488, or any complement thereof. Another interfering RNA molecule of the invention comprises a dsRNA which comprises, consist essentially of or consists of any 21-mer subsequence of SEQ ID NO: 489, wherein N is nucleotide 1 to nucleotide 388 of SEQ ID NO: 489, or any complement thereof. Another interfering RNA molecule of the invention comprises a dsRNA which comprises, consist essentially of or consists of any 21-mer subsequence of SEQ ID NO: 490, wherein N is nucleotide 1 to nucleotide 385 of SEQ ID NO: 490, or any complement thereof. Another interfering RNA molecule of the invention comprises a dsRNA which comprises, consist essentially of or consists of any 21-mer subsequence of SEQ ID NO: 491, wherein N is nucleotide 1 to nucleotide 400 of SEQ ID NO: 491, or any complement thereof. Another interfering RNA molecule of the invention comprises a dsRNA which comprises, consist essentially of or consists of any 21-mer subsequence of SEQ ID NO: 492, wherein N is nucleotide 1 to nucleotide 2044 of SEQ ID NO: 492, or any complement thereof. Another interfering RNA molecule of the invention comprises a dsRNA which comprises, consist essentially of or consists of any 21-mer subsequence of SEQ ID NO: 493, wherein N is nucleotide 1 to nucleotide 3970 of SEQ ID NO: 493, or any complement thereof. Another interfering RNA molecule of the invention comprises a dsRNA which comprises, consist essentially of or consists of any 21-mer subsequence of SEQ ID NO: 494, wherein N is nucleotide 1 to nucleotide 784 of SEQ ID NO: 494, or any complement thereof. Another interfering RNA molecule of the invention comprises a dsRNA which comprises, consist essentially of or consists of any 21-mer subsequence of SEQ ID NO: 495, wherein N is nucleotide 1 to nucleotide 436 of SEQ ID NO: 495, or any complement thereof. Another interfering RNA molecule of the invention comprises a dsRNA which comprises, consist essentially of or consists of any 21-mer subsequence of SEQ ID NO: 496, wherein N is nucleotide 1 to nucleotide 787 of SEQ ID NO: 496, or any complement thereof. Another interfering RNA molecule of the invention comprises a dsRNA which comprises, consist essentially of or consists of any 21-mer subsequence of SEQ ID NO: 497, wherein N is nucleotide 1 to nucleotide 811 of SEQ ID NO: 497, or any complement thereof. Another interfering RNA molecule of the invention comprises a dsRNA which comprises, consist essentially of or consists of any 21-mer subsequence of SEQ ID NO: 498, wherein N is nucleotide 1 to nucleotide 487 of SEQ ID NO: 498, or any complement thereof. Another interfering RNA molecule of the invention comprises a dsRNA which comprises, consist essentially of or consists of any 21-mer subsequence of SEQ ID NO: 499, wherein N is nucleotide 1 to nucleotide 439 of SEQ ID NO: 499, or any complement thereof. Another interfering RNA molecule of the invention comprises a dsRNA which comprises, consist essentially of or consists of any 21-mer subsequence of SEQ ID NO: 500, wherein N is nucleotide 1 to nucleotide 856 of SEQ ID NO: 500, or any complement thereof. Another interfering RNA molecule of the invention comprises a dsRNA which comprises, consist essentially of or consists of any 21-mer subsequence of SEQ ID NO: 501, wherein N is nucleotide 1 to nucleotide 352 of SEQ ID NO: 501, or any complement thereof. Another interfering RNA molecule of the invention comprises a dsRNA which comprises, consist essentially of or consists of any 21-mer subsequence of SEQ ID NO: 502, wherein N is nucleotide 1 to nucleotide 334 of SEQ ID NO: 502, or any complement thereof. Another interfering RNA molecule of the invention comprises a dsRNA which comprises, consist essentially of or consists of any 21-mer subsequence of SEQ ID NO: 503, wherein N is nucleotide 1 to nucleotide 355 of SEQ ID NO: 503, or any complement thereof. Another interfering RNA molecule of the invention comprises a dsRNA which comprises, consist essentially of or consists of any 21-mer subsequence of SEQ ID NO: 504, wherein N is nucleotide 1 to nucleotide 4528 of SEQ ID NO: 504, or any complement thereof. Another interfering RNA molecule of the invention comprises a dsRNA which comprises, consist essentially of or consists of any 21-mer subsequence of SEQ ID NO: 505, wherein N is nucleotide 1 to nucleotide 511 of SEQ ID NO: 505, or any complement thereof. Another interfering RNA molecule of the invention comprises a dsRNA which comprises, consist essentially of or consists of any 21-mer subsequence of SEQ ID NO: 506, wherein N is nucleotide 1 to nucleotide 388 of SEQ ID NO: 506, or any complement thereof. Another interfering RNA molecule of the invention comprises a dsRNA which comprises, consist essentially of or consists of any 21-mer subsequence of SEQ ID NO: 507, wherein N is nucleotide 1 to nucleotide 385 of SEQ ID NO: 507, or any complement thereof. Another interfering RNA molecule of the invention comprises a dsRNA which comprises, consist essentially of or consists of any 21-mer subsequence of SEQ ID NO: 508, wherein N is nucleotide 1 to nucleotide 400 of SEQ ID NO: 508, or any complement thereof. Another interfering RNA molecule of the invention comprises a dsRNA which comprises, consist essentially of or consists of any 21-mer subsequence of SEQ ID NO: 509, wherein N is nucleotide 1 to nucleotide 1939 of SEQ ID NO: 509, or any complement thereof. Another interfering RNA molecule of the invention comprises a dsRNA which comprises, consist essentially of or consists of any 21-mer subsequence of SEQ ID NO: 510, wherein N is nucleotide 1 to nucleotide 3970 of SEQ ID NO: 510, or any complement thereof.

[0194] In still other embodiments, the interfering RNA molecule of the invention comprises a dsRNA which comprises, consists essentially of or consists of SEQ ID NO: 409-612, or the complement thereof.

[0195] In other embodiments of the interfering RNA molecule of the invention, the nucleotide sequence of the antisense strand of a dsRNA of the invention comprises, consists essentially of or consists of the complementary RNA sequence of SEQ ID NO: 409-612. The nucleotide sequence of the antisense strand of a dsRNA of the invention can have one nucleotide at either the 3′ or 5′ end deleted or can have up to six nucleotides added at the 3′ end, the 5′ end or both, in any combination to achieve an antisense strand consisting essentially of any 19-mer, any 20-mer, or any 21-mer nucleotide sequence of SEQ ID NO: 409-612, as it would be understood that the deletion of the one nucleotide or the addition of up to the six nucleotides do not materially affect the basic characteristics or function of the double stranded RNA molecule of the invention. Such additional nucleotides can be nucleotides that extend the complementarity of the antisense strand along the target sequence and/or such nucleotides can be nucleotides that facilitate manipulation of the RNA molecule or a nucleic acid molecule encoding the RNA molecule, as would be known to one of ordinary skill in the art. For example, a TT overhang at the 3′ end may be present, which is used to stabilize the siRNA duplex and does not affect the specificity of the siRNA.

[0196] In some embodiments of this invention, the antisense strand of the double stranded RNA of the interfering RNA molecule can be fully complementary to the target RNA polynucleotide or the antisense strand can be substantially complementary or partially complementary to the target RNA polynucleotide. The dsRNA of the interfering RNA molecule may comprise a dsRNA which is a region of double-stranded RNA comprising substantially complementary annealed strands, or which is a region of double-stranded RNA comprising fully complementary annealed strands. By substantially or partially complementary is meant that the antisense strand and the target RNA polynucleotide can be mismatched at about 1, 2, 3, 4, 5, 6, 7, 8, 9, or 10 nucleotide pairings. Such mismatches can be introduced into the antisense strand sequence, e.g., near the 3′ end, to enhance processing of the double stranded RNA molecule by Dicer, to duplicate a pattern of mismatches in a siRNA molecule inserted into a chimeric nucleic acid molecule or artificial microRNA precursor molecule of this invention, and the like, as would be known to one of skill in the art. Such modification will weaken the base pairing at one end of the duplex and generate strand asymmetry, therefore enhancing the chance of the antisense strand, instead of the sense strand, being processed and silencing the intended gene (Geng and Ding “Double-mismatched siRNAs enhance selective gene silencing of a mutant ALS-causing Allele1” Acta Pharmacol. Sin. 29:211-216 (2008); Schwarz et al. “Asymmetry in the assembly of the RNAi enzyme complex” Cell 115:199-208 (2003)).

[0197] In some embodiments of this invention, the interfering RNA comprises a dsRNA which comprises a short hairpin RNA (shRNA) molecule. Expression of shRNA in cells is typically accomplished by delivery of plasmids or recombinant vectors, for example in transgenic plants such as transgenic canola.

[0198] The invention encompasses a nucleic acid construct comprising an interfering RNA of the invention. The invention further encompasses a nucleic acid molecule encoding at least one interfering molecule of the invention. The invention further encompasses a nucleic acid construct comprising at least one interfering molecule of the invention or comprising a nucleic acid molecule encoding the at least one interfering molecule of the invention. The invention further encompasses a nucleic acid construct wherein the nucleic acid construct is an expression vector. The invention further encompasses a recombinant vector comprising a regulatory sequence operably linked to a nucleotide sequence that encodes an interfering RNA molecule of the invention. A regulatory sequence may refer to a promoter, enhancer, transcription factor binding site, insulator, silencer, or any other DNA element involved in the expression of a gene.

[0199] The invention further encompasses chimeric nucleic acid molecules comprising an interfering RNA molecule with an antisense strand of a dsRNA operably linked with a plant microRNA precursor molecule. In some embodiments, the chimeric nucleic acid molecule comprises an antisense strand having the nucleotide sequence of any of the 21-mer subsequences complementary to SEQ ID NOs: 409-612, or any complement thereof, operably linked with a plant microRNA precursor molecule. In some embodiments, the plant microRNA precursor molecule is a canola microRNA precursor.

[0200] The use of artificial plant microRNAs to deliver a nucleotide sequence of interest (e.g an artificial miRNA; siRNA/siRNA*) into a plant is known in the art (see, e.g., Schwab et al. 2006. The Plant Cell 18:1121-1133 and Examples section herein). In the invention, the artificial microRNAs are chimeric or hybrid molecules, having a plant microRNA precursor backbone and an insect siRNA sequence inserted therein. As would be understood by one of ordinary skill in the art, it is typically desirable to maintain mismatches that normally occur in the plant microRNA precursor sequence in any nucleotide sequence that is substituted into the plant microRNA precursor backbone. In still other embodiments, the artificial plant microRNA precursor comprises portions of a canola microRNA precursor molecule. Any canola microRNA (miRNA) precursor is suitable for the compositions and methods of the invention. Non-limiting examples include miR156, miR159, miR166, miR167, miR168, miR169, miR171, miR172, miR319, miR390, miR393, miR394, miR395, miR396, miR397, miR398, miR399, miR408, miR482, miR528, miR529, miR827, miR838, miR1432, as well as any other plant miRNA precursors now known or later identified.

[0201] In some embodiments, the invention encompasses interfering RNA molecules, nucleic acid constructs, nucleic acid molecules or recombinant vectors comprising at least one strand of a dsRNA of an interfering RNA molecule of the invention, or comprising a chimeric nucleic acid molecule of the invention, or comprising an artificial plant microRNA of the invention. In some embodiments the nucleic acid construct comprises a nucleic acid molecule of the invention. In other embodiments, the nucleic acid construct is a recombinant expression vector.

[0202] In some embodiments, the interfering RNA molecules of the invention have insecticidal activity on an insect, namely a flea beetle, from the tribe Alticini. In some embodiments, the interfering RNA molecules of the present invention have activity on an insect which is species of a genus selected from the group consisting of the genera Altica, Anthobiodes, Aphthona, Aphthonaltica, Aphthonoides, Apteopeda, Argopistes, Argopus, Arrhenocoela, Batophila, Blepharida, Chaetocnema, Clitea, Crepidodera, Derocrepis, Dibolia, Disonycha, Epitrix, Hermipyxis, Hermaeophaga, Hespera, Hippuriphila, Horaia, Hyphasis, Lipromima, Liprus, Longitarsus, Luperomorpha, Lythraria, Manobia, Mantura, Meishania, Minota, Mniophila, Neicrepidodera, Nonarthra, Novofoudrasia, Ochrosis, Oedionychis, Oglobinia, Omeisphaera, Ophrida, Orestia, Paragopus, Pentamesa, Philopona, Phygasia, Phyllotreta, Podagrica, Podagricomela, Podontia, Pseudodera, Psylliodes, Sangariola, Sinaltica, Sphaeroderma, Systena, Trachyaphthona, Xuthea, and Zipangia. In embodiments, the insect is a species selected from the group consisting of Altica ambiens (alder flea beetle), Altica canadensis (prairie flea beetle), Altica chalybaea (grape flea beetle), Altica prasina (poplar flea beetle), Altica rosae (rose flea beetle), Altica sylvia (blueberry flea beetle), Altica ulmi (elm flea beetle), Chaetocnema pulicaria (corn flea beetle), Chaetocnema conofinis (sweet potato flea beetle), Epitrix cucumeris (potato flea beetle), Systena blanda (palestripped flea beetle), and Systena frontalis (redheaded flea beetle). In embodiments, the insect is a species selected from the group consisting of Phyllotreta armoraciae (horseradish flea beetle), Phyllotreta cruciferae (canola flea beetle), Phyllotreta pusilla (western black flea beetle), Phyllotreta nemorum (striped turnip flea beetle), Phyllotreta atra (turnip flea beetle), Phyllotreta robusta (garden flea beetle), Phyllotreta striolata (striped flea beetle), Phyllotreta undulata, Psylliodes chrysocephala, and Psylliodes punctulata (hop flea beetle). In some embodiments, the coding sequence of the target gene comprises a sequence selected from the group comprising SEQ ID NO: 1-102.

[0203] In some embodiments, the invention encompasses a composition comprising one or more or two or more of the interfering RNA molecules of the invention. In some embodiments, the interfering RNA molecules are present on the same nucleic acid construct, on different nucleic acid constructs, or any combination thereof. For example, one interfering RNA molecule of the invention may be present on a nucleic acid construct, and a second interfering RNA molecule of the invention may be present on the same nucleic acid construct or on a separate, second nucleic acid construct. The second interfering RNA molecule of the invention may be to the same target gene or to a different target gene.

[0204] In some embodiments, the invention encompasses a composition comprising an interfering RNA molecule which comprises at least one dsRNA wherein the dsRNA is a region of double-stranded RNA comprising annealed complementary strands. One strand of the dsRNA comprises a sequence of at least 19, at least 20, at least 21, at least 22, at least 23, at least 24, at least 25, at least 26, at least 27, at least 28, at least 29, at least 30, at least 35, at least 40, at least 45, at least 50, at least 55, at least 60, at least 65, at least 70, at least 75, at least 80, at least 85, at least 90, at least 95, at least 100, at least 110, at least 120, at least 130, at least 140, at least 150, at least 160, at least 170, at least 180, at least 190, at least 200, at least 210, at least 220, at least 230, at least 240, at least 250, at least 260, at least 270, at least 280, at least 290, or at least 300 contiguous nucleotides which is at least partially complementary to a target nucleotide sequence within a flea beetle target gene. The interfering RNA molecule (i) has at least 80% identity, at least 85% identity, at least 86% identity, at least 87% identity, at least 88% identity, at least 89% identity, at least 90% identity, at least 91% identity, at least 92% identity, at least 93% identity, at least 94% identity, at least 95% identity, at least 96% identity, at least 97% identity, at least 98% identity, at least 99% identity, or 100% identity, to at least a 19, at least a 20, at least a 21, at least a 22, at least a 23, at least a 24, at least a 25, at least a 26, at least a 27, at least a 28, at least a 29, at least a 30, at least a 35, at least a 40, at least a 45, at least a 50, at least a 55, at least a 60, at least a 65, at least a 70, at least a 75, at least a 80, at least a 85, at least a 90, at least a 95, at least a 100, at least a 110, at least a 120, at least a 130, at least a 140, at least a 150, at least a 160, at least a 170, at least a 180, at least a 190, at least a 200, at least a 210, at least a 220, at least a 230, at least a 240, at least a 250, at least a 260, at least a 270, at least a 280, at least a 290, or at least a 300 contiguous nucleotide fragment of SEQ ID NO: 409-612, or the complement thereof; (ii) comprises at least a 19, at least a 20, at least a 21, at least a 22, at least a 23, at least a 24, at least a 25, at least a 26, at least a 27, at least a 28, at least a 29, at least a 30, at least a 35, at least a 40, at least a 45, at least a 50, at least a 55, at least a 60, at least a 65, at least a 70, at least a 75, at least a 80, at least a 85, at least a 90, at least a 95, at least a 100, at least a 110, at least a 120, at least a 130, at least a 140, at least a 150, at least a 160, at least a 170, at least a 180, at least a 190, at least a 200, at least a 210, at least a 220, at least a 230, at least a 240, at least a 250, at least a 260, at least a 270, at least a 280, at least a 290, or at least a 300 contiguous nucleotide fragment of SEQ ID NO: 409-612, or the complement thereof; (iii) comprises at least a 19, at least a 20, at least a 21, at least a 22, at least a 23, at least a 24, at least a 25, at least a 26, at least a 27, at least a 28, at least a 29, at least a 30, at least a 35, at least a 40, at least a 45, at least a 50, at least a 55, at least a 60, at least a a 65, at least a 70, at least a 75, at least a 80, at least a 85, at least a 90, at least a 95, at least a 100, at least a 110, at least a 120, at least a 130, at least a 140, at least a 150, at least a 160, at least a 170, at least a 180, at least a 190, at least a 200, at least a 210, at least a 220, at least a 230, at least a 240, at least a 250, at least a 260, at least a 270, at least a 280, at least a 290, or at least a 300 contiguous nucleotide fragment of a nucleotide sequence encoding an amino acid sequence encoded by SEQ ID NO: 409-612, or the complement thereof, or (iv) can hybridize under stringent conditions to a polynucleotide selected from the group consisting of SEQ ID NO: 409-612, and the complements thereof.

[0205] In some embodiments, the invention encompasses compositions comprising an interfering RNA molecule comprising two or more dsRNAs, wherein the two or more dsRNAs each comprise a different antisense strand. In some embodiments the invention encompasses compositions comprising at least two more interfering RNA molecules, wherein the two or more interfering RNA molecules each comprise a dsRNA comprising a different antisense strand. The two or more interfering RNAs may be present on the same nucleic acid construct, on different nucleic acid constructs or any combination thereof. In other embodiments, the composition comprises a RNA molecule comprising an antisense strand consisting essentially of a nucleotide sequence comprising at least a 19 contiguous nucleotide fragment complementary to at least a 19 contiguous nucleotide fragment comprising the RNA sequence of SEQ ID NO: 409-612, and in some embodiments may further comprise an RNA molecule comprising an antisense strand consisting essentially of a second nucleotide sequence comprising at least a 19 contiguous nucleotide fragment complementary to at least a 19 contiguous nucleotide fragment of SEQ ID NO: 409-612; and in some embodiments may further comprise an RNA molecule comprising an antisense strand consisting essentially of a third nucleotide sequence comprising at least a 19 contiguous nucleotide fragment complementary to at least a 19 contiguous nucleotide fragment of SEQ ID NO: 409-612, and in some embodiments may further comprise an RNA molecule comprising an antisense strand consisting essentially of a fourth nucleotide sequence comprising at least a 19 contiguous nucleotide fragment complementary to at least a 19 contiguous nucleotide fragment of SEQ ID NO: 409-612, and in some embodiments may further comprise an RNA molecule comprising an antisense strand consisting essentially of a fifth nucleotide sequence comprising at least a 19 contiguous nucleotide fragment complementary to at least a 19 contiguous nucleotide fragment of SEQ ID NO: 409-612, and in some embodiments may further comprise an RNA molecule comprising an antisense strand consisting essentially of a sixth nucleotide sequence comprising at least a 19 contiguous nucleotide fragment complementary to at least a 19 contiguous nucleotide fragment of SEQ ID NO: 409-612, and in some embodiments may further comprise an RNA molecule comprising an antisense strand consisting essentially of a seventh nucleotide sequence comprising at least a 19 contiguous nucleotide fragment complementary to at least a 19 contiguous nucleotide fragment of SEQ ID NO: 409-612. In other embodiments, the composition may comprise two or more of the nucleic acid molecules, wherein the two or more nucleic acid molecules each encode a different interfering RNA molecule. In other embodiments, the composition may comprise two or more of the nucleic acid constructs, wherein the two or more nucleic acid constructs each comprise a nucleic acid molecule encoding a different interfering RNA.

[0206] In other embodiments, the composition comprises two or more nucleic acid constructs, two or more nucleic acid molecules, two or more chimeric nucleic acid molecules, two or more artificial plant microRNA precursors of the invention, wherein the two or more nucleic acid constructs, two or more nucleic acid molecules, two or more chimeric nucleic acid molecules, or two or more artificial plant microRNA precursors, each comprise a different antisense strand.

[0207] In some embodiments, the invention encompasses an insecticidal composition for inhibiting the expression of a flea beetle gene described herein, comprising an interfering RNA of the invention and an agriculturally acceptable carrier. In some embodiments, the acceptable agricultural carrier is a transgenic organism expressing an interfering RNA of the invention. In some embodiments the transgenic organism may be a transgenic plant expressing the interfering RNA of the invention that when fed upon by a target Coleopteran plant pest causes the target Coleopteran plant pest to stop feeding, growing or reproducing or causing death of the target Coleopteran plant pest. In other embodiments, the transgenic plant is a transgenic canola plant and the target pest is a flea beetle insect pest. In still other embodiments, the flea beetle insect pest is from the tribe Alticini. In other embodiments, the flea beetle is a species of a genus selected from the group consisting of the genera Altica, Anthobiodes, Aphthona, Aphthonaltica, Aphthonoides, Apteopeda, Argopistes, Argopus, Arrhenocoela, Batophila, Blepharida, Chaetocnema, Clitea, Crepidodera, Derocrepis, Dibolia, Disonycha, Epitrix, Hermipyxis, Hermaeophaga, Hespera, Hippuriphila, Horaia, Hyphasis, Lipromima, Liprus, Longitarsus, Luperomorpha, Lythraria, Manobia, Mantura, Meishania, Minota, Mniophila, Neicrepidodera, Nonarthra, Novofoudrasia, Ochrosis, Oedionychis, Oglobinia, Omeisphaera, Ophrida, Orestia, Paragopus, Pentamesa, Philopona, Phygasia, Phyllotreta, Podagrica, Podagricomela, Podontia, Pseudodera, Psylliodes, Sangariola, Sinaltica, Sphaeroderma, Systena, Trachyaphthona, Xuthea, and Zipangia. In embodiments, the insect is a species selected from the group consisting of Altica ambiens (alder flea beetle), Altica canadensis (prairie flea beetle), Altica chalybaea (grape flea beetle), Altica prasina (poplar flea beetle), Altica rosae (rose flea beetle), Altica sylvia (blueberry flea beetle), Altica ulmi (elm flea beetle), Chaetocnema pulicaria (corn flea beetle), Chaetocnema conofinis (sweet potato flea beetle), Epitrix cucumeris (potato flea beetle), Systena blanda (palestripped flea beetle), and Systena frontalis (redheaded flea beetle). In embodiments, the insect is a species selected from the group consisting of Phyllotreta armoraciae (horseradish flea beetle), Phyllotreta cruciferae (canola flea beetle), Phyllotreta pusilla (western black flea beetle), Phyllotreta nemorum (striped turnip flea beetle), Phyllotreta atra (turnip flea beetle), Phyllotreta robusta (garden flea beetle), Phyllotreta striolata (striped flea beetle), Phyllotreta undulata, Psylliodes chrysocephala, and Psylliodes punctulata (hop flea beetle).

[0208] In other embodiments, the transgenic organism is selected from, but not limited to, the group consisting of: yeast, fungi, algae, bacteria, virus or an arthropod expressing the interfering RNA molecule of the invention. In some embodiments, the transgenic organism is a virus, for example an insect baculovirus that expresses an interfering RNA molecule of the invention upon infection of an insect host. Such a baculovirus is likely more virulent against the target insect than the wildtype untransformed baculovirus. In other embodiments the transgenic organism is a transgenic bacterium that is applied to an environment where a target pest occurs or is known to have occurred. In some embodiments, non-pathogenic symbiotic bacteria, which are able to live and replicate within plant tissues, so-called endophytes, or non-pathogenic symbiotic bacteria, which are capable of colonizing the phyllosphere or the rhizosphere, so-called epiphytes, are used. Such bacteria include bacteria of the genera Agrobacterium, Alcaligenes, Azospirillum, Azotobacter, Bacillus, Clavibacter, Enterobacter, Erwinia, Flavobacter, Klebsiella, Pseudomonas, Rhizobium, Serratia, Streptomyces and Xanthomonas. Symbiotic fungi, such as Trichoderma and Gliocladium are also possible hosts for expression of the inventive interfering RNA molecule for the same purpose.

[0209] In some embodiments, an acceptable agricultural carrier is a formulation useful for applying the composition comprising the interfering RNA molecule to a plant or seed. In some embodiments, the interfering RNA molecules are stabilized against degradation because of their double stranded nature and the introduction of Dnase/Rnase inhibitors. For example, dsRNA or siRNA can be stabilized by including thymidine or uridine nucleotide 3′ overhangs. The dsRNA or siRNA contained in the compositions of the invention can be chemically synthesized at industrial scale in large amounts. Methods available would be through chemical synthesis or through the use of a biological agent.

[0210] In some embodiments, the invention encompasses transgenic plants, or parts thereof, comprising an interfering RNA molecule, a nucleic acid construct, a chimeric nucleic acid molecule, a artificial plant microRNA precursor molecule and/or a composition of the invention, wherein the transgenic plant has enhanced resistance to a Coleopteran insect or flea beetle as compared to a control plant. In other embodiments, the transgenic plant, or part thereof, is a transgenic canola plant, or part thereof. The invention further encompasses transgenic seed of the transgenic plants of the invention, wherein the transgenic seed comprises an interfering RNA molecule, a nucleic acid construct, a chimeric nucleic acid molecule, an artificial plant microRNA precursor molecule and/or a composition of the invention. In some embodiments the transgenic seed is a transgenic canola seed.

[0211] Transgenic plants expressing an interfering RNA of the invention are tolerant or resistant to attack by target insect pests. When the insect starts feeding on such a transgenic plant, it also ingests the expressed dsRNA or siRNA. This may deter the insect from further biting into the plant tissue or may even harm or kill the insect. A nucleic acid sequence encoding a dsRNA or siRNA of the invention is inserted into an expression cassette, which is then preferably stably integrated in the genome of the plant. The nucleic acid sequences of the expression cassette introduced into the genome of the plant are heterologous to the plant and non-naturally occurring. Plants transformed in accordance with the present invention may be monocots or dicots and include, but are not limited to, corn, wheat, barley, rye, sweet potato, bean, pea, chicory, lettuce, cabbage, cauliflower, broccoli, turnip, radish, spinach, asparagus, onion, garlic, pepper, celery, squash, pumpkin, hemp, zucchini, apple, pear, quince, melon, plum, cherry, peach, nectarine, apricot, strawberry, grape, raspberry, blackberry, pineapple, avocado, papaya, mango, banana, soybean, tomato, sorghum, sugarcane, sugar beet, sunflower, rapeseed (also referred to as canola), clover, tobacco, carrot, cotton, alfalfa, rice, potato, eggplant, cucumber, Arabidopsis, and woody plants such as coniferous and deciduous trees. In further embodiments, the transgenic plant is a transgenic canola plant.

[0212] Expression of the interfering RNA molecule in transgenic plants is driven by regulatory sequences comprising promoters that function in plants. The choice of promoter will vary depending on the temporal and spatial requirements for expression, and also depending on the insect target species. Thus, expression of the interfering RNAs of this invention in leaves, in stems, in inflorescences (e.g. anther, filament, pollen, style, petal, sepal, pedicel, stamen, etc.), in roots, and/or seedlings is contemplated. In many cases, however, protection against more than one type of insect pest is sought, and thus expression in multiple tissues is desirable. Although many promoters from dicotyledons have been shown to be operational in monocotyledons and vice versa, ideally dicotyledonous promoters are selected for expression in dicotyledons, and monocotyledonous promoters for expression in monocotyledons. However, there is no restriction to the provenance of selected promoters; it is sufficient that they are operational in driving the expression of the dsRNA or siRNA in the desired cell.

[0213] Promoters useful with the invention include, but are not limited to, those that drive expression of a nucleotide sequence constitutively, those that drive expression when induced, and those that drive expression in a tissue- or developmentally-specific manner. These various types of promoters are known in the art.

[0214] In some embodiments, tissue-specific/tissue-preferred promoters can be used. Tissue-specific or tissue-preferred expression patterns include, but are not limited to, green tissue specific or preferred, root specific or preferred, stem specific or preferred, and flower specific or preferred. In addition, promoters functional in plastids can be used. In some embodiments of the invention, inducible promoters can be used. In further aspects, the nucleotide sequences of the invention can be operably associated with a promoter that is wound inducible or inducible by pest or pathogen infection (e.g., a insect or nematode plant pest)

[0215] In some embodiments of the present invention, a “minimal promoter” or “basal promoter” is used. A minimal promoter is capable of recruiting and binding RNA polymerase II complex and its accessory proteins to permit transcriptional initiation and elongation. In some embodiments, a minimal promoter is constructed to comprise only the nucleotides/nucleotide sequences from a selected promoter that are required for binding of the transcription factors and transcription of a nucleotide sequence of interest that is operably associated with the minimal promoter including but not limited to TATA box sequences. In other embodiments, the minimal promoter lacks cis sequences that recruit and bind transcription factors that modulate (e.g., enhance, repress, confer tissue specificity, confer inducibility or repressibility) transcription. A minimal promoter is generally placed upstream (i.e., 5′) of a nucleotide sequence to be expressed. Thus, nucleotides/nucleotide sequences from any promoter useable with the present invention can be selected for use as a minimal promoter.

[0216] In some embodiments, a recombinant nucleic acid molecule of the invention can be an “expression cassette.” As used herein, “expression cassette” means a recombinant nucleic acid molecule comprising a nucleotide sequence of interest (e.g., the nucleotide sequences of the invention), wherein the nucleotide sequence is operably associated with at least a control sequence (e.g., a promoter). Thus, some embodiments of the invention provide expression cassettes designed to express nucleotides sequences encoding the dsRNAs or siRNAs of the invention. In this manner, for example, one or more plant promoters operably associated with one or more nucleotide sequences of the invention are provided in expression cassettes for expression in a canola plant, plant part and/or plant cell.

[0217] An expression cassette comprising a nucleotide sequence of interest may be chimeric, meaning that at least one of its components is heterologous with respect to at least one of its other components. An expression cassette may also be one that comprises a native promoter driving its native gene, however it has been obtained in a recombinant form useful for heterologous expression. Such usage of an expression cassette makes it so it is not naturally occurring in the cell into which it has been introduced.

[0218] An expression cassette also can optionally include a transcriptional and/or translational termination region (i.e., termination region) that is functional in plants. A variety of transcriptional terminators are available for use in expression cassettes and are responsible for the termination of transcription beyond the heterologous nucleotide sequence of interest and correct mRNA polyadenylation. The termination region may be native to the transcriptional initiation region, may be native to the operably linked nucleotide sequence of interest, may be native to the plant host, or may be derived from another source (i.e., foreign or heterologous to the promoter, the nucleotide sequence of interest, the plant host, or any combination thereof). Appropriate transcriptional terminators include, but are not limited to, the CAMV 35S terminator, the tml terminator, the nopaline synthase terminator and/or the pea rbcs E9 terminator. These can be used in both monocotyledons and dicotyledons. In addition, a coding sequence's native transcription terminator can be used.

[0219] An expression cassette of the invention also can include a nucleotide sequence for a selectable marker, which can be used to select a transformed plant, plant part and/or plant cell. As used herein, “selectable marker” means a nucleotide sequence that when expressed imparts a distinct phenotype to the plant, plant part and/or plant cell expressing the marker and thus allows such transformed plants, plant parts and/or plant cells to be distinguished from those that do not have the marker. Such a nucleotide sequence may encode either a selectable or screenable marker, depending on whether the marker confers a trait that can be selected for by chemical means, such as by using a selective agent (e.g., an antibiotic, herbicide, or the like), or on whether the marker is simply a trait that one can identify through observation or testing, such as by screening (e.g., the R-locus trait). Of course, many examples of suitable selectable markers are known in the art and can be used in the expression cassettes described herein.

[0220] Examples of selectable markers include, but are not limited to, a nucleotide sequence encoding neo or nptII, which confers resistance to kanamycin, G418, and the like (Potrykus et al. (1985) Mol. Gen. Genet. 199:183-188); a nucleotide sequence encoding bar, which confers resistance to phosphinothricin; a nucleotide sequence encoding an altered 5-enolpyruvylshikimate-3-phosphate (EPSP) synthase, which confers resistance to glyphosate (Hinchee et al. (1988) Biotech. 6:915-922); a nucleotide sequence encoding a nitrilase such as bxn from Klebsiella ozaenae that confers resistance to bromoxynil (Stalker et al. (1988) Science 242:419-423); a nucleotide sequence encoding an altered acetolactate synthase (ALS) that confers resistance to imidazolinone, sulfonylurea or other ALS-inhibiting chemicals (EP Patent Application No. 154204); a nucleotide sequence encoding a methotrexate-resistant dihydrofolate reductase (DHFR) (Thillet et al. (1988) J. Biol. Chem. 263:12500-12508); a nucleotide sequence encoding a dalapon dehalogenase that confers resistance to dalapon; a nucleotide sequence encoding a mannose-6-phosphate isomerase (also referred to as phosphomannose isomerase (PMI)) that confers an ability to metabolize mannose (U.S. Pat. Nos. 5,767,378 and 5,994,629); a nucleotide sequence encoding an altered anthranilate synthase that confers resistance to 5-methyl tryptophan; and/or a nucleotide sequence encoding hph that confers resistance to hygromycin. One of skill in the art is capable of choosing a suitable selectable marker for use in an expression cassette of the invention.

[0221] An expression cassette of the invention also can include polynucleotides that encode other desired traits. Such desired traits can be other polynucleotides which confer insect resistance, or which confer nematode resistance, or other agriculturally desirable traits. Such polynucleotides can be stacked with any combination of nucleotide sequences to create plants, plant parts or plant cells having the desired phenotype. Stacked combinations can be created by any method including, but not limited to, cross breeding plants by any conventional methodology, or by genetic transformation. If stacked by genetically transforming the plants, nucleotide sequences encoding additional desired traits can be combined at any time and in any order. For example, a single transgene can comprise multiple expression cassettes, such that multiple expression cassettes are introduced into the genome of a transformed cell at a single genomic location. Alternatively, a transgenic plant comprising one or more desired traits can be used as the target to introduce further traits by subsequent transformation. The additional nucleotide sequences can be introduced simultaneously in a co-transformation protocol with a nucleotide sequence, nucleic acid molecule, nucleic acid construct, and/or other composition of the invention, provided by any combination of expression cassettes. For example, if two nucleotide sequences will be introduced, they can be incorporated in separate cassettes (trans) or can be incorporated on the same cassette (cis). Expression of the nucleotide sequences can be driven by the same promoter or by different promoters. It is further recognized that nucleotide sequences can be stacked at a desired genomic location using a site-specific recombination system. See, e.g., Int'l Patent Application Publication Nos. WO 99/25821; WO 99/25854; WO 99/25840; WO 99/25855 and WO 99/25853.

[0222] Thus, an expression cassette can include a coding sequence for one or more polypeptides for agronomic traits that primarily are of benefit to a seed company, grower or grain processor. A polypeptide of interest can be any polypeptide encoded by a polynucleotide sequence of interest. Non-limiting examples of polypeptides of interest that are suitable for production in plants include those resulting in agronomically important traits such as herbicide resistance (also sometimes referred to as “herbicide tolerance”), virus resistance, bacterial pathogen resistance, insect resistance, nematode resistance, and/or fungal resistance. See, e.g., U.S. Pat. Nos. 5,569,823; 5,304,730; 5,495,071; 6,329,504; and 6,337,431.

[0223] Vectors suitable for plant transformation are described elsewhere in this specification. For Agrobacterium-mediated transformation, binary vectors or vectors carrying at least one T-DNA border sequence are suitable, whereas for direct gene transfer any vector is suitable and linear DNA containing only the construct of interest may be preferred. In the case of direct gene transfer, transformation with a single DNA species or co-transformation can be used (Schocher et al. Biotechnology 4:1093-1096 (1986)). For both direct gene transfer and Agrobacterium-mediated transfer, transformation is usually (but not necessarily) undertaken with a selectable marker that may provide resistance to an antibiotic (kanamycin, hygromycin or methotrexate) or a herbicide (basta). Plant transformation vectors of the invention may also comprise other selectable marker genes, for example, phosphomannose isomerase (pmi), which provides for positive selection of the transgenic plants as disclosed in U.S. Pat. Nos. 5,767,378 and 5,994,629, or phosphinotricin acetyltransferase (pat), which provides tolerance to the herbicide phosphinotricin (glufosinate). The choice of selectable marker is not, however, critical to the invention.

[0224] In other embodiments, a nucleic acid sequence of the invention is directly transformed into the plastid genome. Plastid transformation technology is extensively described in U.S. Pat. Nos. 5,451,513, 5,545,817, and 5,545,818, in PCT application no. WO 95/16783, and in McBride et al. (1994) Proc. Nati. Acad. Sci. USA 91, 7301-7305. The basic technique for chloroplast transformation involves introducing regions of cloned plastid DNA flanking a selectable marker together with the gene of interest into a suitable target tissue, e.g., using biolistics or protoplast transformation (e.g., calcium chloride or PEG mediated transformation). The 1 to 1.5 kb flanking regions, termed targeting sequences, facilitate homologous recombination with the plastid genome and thus allow the replacement or modification of specific regions of the plastome. Initially, point mutations in the chloroplast 16S rRNA and rps12 genes conferring resistance to spectinomycin and/or streptomycin are utilized as selectable markers for transformation (Svab, Z., Hajdukiewicz, P., and Maliga, P. (1990) Proc. Nati. Acad. Sci. USA 87, 8526-8530; Staub, J. M., and Maliga, P. (1992) Plant Cell 4, 39-45). This resulted in stable homoplasmic transformants at a frequency of approximately one per 100 bombardments of target leaves. The presence of cloning sites between these markers allowed creation of a plastid targeting vector for introduction of foreign genes (Staub, J. M., and Maliga, P. (1993) EMBO J. 12, 601-606). Substantial increases in transformation frequency are obtained by replacement of the recessive rRNA or r-protein antibiotic resistance genes with a dominant selectable marker, the bacterial aadA gene encoding the spectinomycin-cletoxifying enzyme aminoglycoside-3′-adenyltransf erase (Svab, Z., and Maliga, P. (1993) Proc. Natl. Acad. Sci. USA 90, 913-917). Previously, this marker had been used successfully for high-frequency transformation of the plastid genome of the green alga Chlamydomonas reinhardtii (Goldschmidt-Clermont, M. (1991) Nucl. Acids Res. 19:4083-4089). Other selectable markers useful for plastid transformation are known in the art and encompassed within the scope of the invention. Typically, approximately 15-20 cell division cycles following transformation are required to reach a homoplastidic state. Plastid expression, in which genes are inserted by homologous recombination into all of the several thousand copies of the circular plastid genome present in each plant cell, takes advantage of the enormous copy number advantage over nuclear-expressed genes to permit expression levels that can readily exceed 10% of the total soluble plant protein. In a preferred embodiment, a nucleic acid sequence of the present invention is inserted into a plastid-targeting vector and transformed into the plastid genome of a desired plant host. Plants homoplastic for plastid genomes containing a nucleic acid sequence of the present invention are obtained, and are preferentially capable of high expression of the nucleic acid sequence.

[0225] The compositions of the invention can also be combined with other biological control agents to enhance control of a Coleopteran insect or a flea beetle populations. Thus, the invention provides a method of enhancing control of a Coleopteran insect population or a flea beetle population by providing a transgenic plant that produces an interfering RNA of the invention and further comprises a polynucleotide that encodes a second insecticidal agent. The second insecticidal agent may be an insecticidal protein derived from Bacillus thuringiensis. A B. thuringiensis insecticidal protein can be any of a number of insecticidal proteins including but not limited to a Cry1 protein, a Cry3 protein, a Cry7 protein, a Cry8 protein, a Cry11 protein, a Cry22 protein, a Cry 23 protein, a Cry 36 protein, a Cry37 protein, a Cry34 protein together with a Cry35 protein, a binary insecticidal protein CryET33 and CryET34, a binary insecticidal protein TIC100 and TIC101, a binary insecticidal protein PS149B1, a VIP, a TIC900 or related protein, a TIC901, TIC1201, TIC407, TIC417, a modified Cry3A protein, or hybrid proteins or chimeras made from any of the preceding insecticidal proteins. The insecticidal protein may be any other insecticidal protein derived from B. thuringiensis known in the art to be insecticidal (see for example, Palma et al., 2014, Toxins 6: 3296-3325, and references within; Berry and Crickmore, 2017, J of Invertebrate Pathology 142: 16-22, and reference within).

[0226] In other embodiments, the transgenic plant may produce an interfering RNA of the invention and a second insecticidal agent which is derived from sources other than B. thuringiensis. The second insecticidal agent can be an agent selected from the group comprising a patatin, a protease, a protease inhibitor, a chitinase, a urease, an alpha-amylase inhibitor, a pore-forming protein, a lectin, an engineered antibody or antibody fragment, a Bacillus cereus insecticidal protein, a Xenorhabdus spp. (such as X. nematophila or X. bovienii) insecticidal protein, a Photorhabdus spp. (such as P. luminescens or P. asymobiotica) insecticidal protein, a Brevibacillus laterosporous insecticidal protein, a Lysinibacillus sphearicus insecticidal protein, a Chromobacterium spp. insecticidal protein, a Yersinia entomophaga insecticidal protein, a Paenibacillus popiliae insecticidal protein, a Clostridium spp. (such as C. bifermentans) insecticidal protein, and a lignin. In other embodiments, the second agent may be at least one insecticidal protein derived from an insecticidal toxin complex (Tc) from Photorhabdus, Xenorhabus, Serratia, or Yersinia. In other embodiments, the insecticidal protein may be an ADP-ribosyltransferase derived from an insecticidal bacteria, such as Photorhabdus spp. In other embodiments, the insecticidal protein may be a VIP protein, such as VIP1 or VIP2 from B. cereus. In still other embodiments, the insecticidal protein may be a binary toxin derived from an insecticidal bacteria, such as ISP1A and ISP2A from B. laterosporous or BinA and BinB from L. sphaericus. In still other embodiments, the insecticidal protein may be engineered or may be a hybrid or chimera of any of the preceding insecticidal proteins.

[0227] In another embodiment, the transgenic plant and transgenic seed is a canola plant or canola seed. In another embodiment, the transgenic canola plant is provided by crossing a first transgenic canola plant comprising a dsRNA of the invention with a transgenic canola plant comprising a transgenic event, for example RoundupReady® Canola, Navigator™ Canola, Phytaseed™ Canola, or LibertyLink® Canola.

[0228] Even where the insecticide or insecticidal seed coating is active against a different insect, the insecticide or insecticidal seed coating is useful to expand the range of insect control, for example by adding an insecticide or insecticidal seed coating that has activity against lepidopteran insects to the transgenic plant or seed of the invention, which has activity against Coleopteran insects, the treated plant or coated transgenic seed controls both lepidopteran and Coleopteran insect pests.

[0229] In further embodiments, the invention encompasses a biological sample from a transgenic plant, seed, or parts thereof, of the invention, wherein the sample comprises a nucleic acid that is or encodes at least one strand of a dsRNA of the invention. In other embodiments, the invention encompasses a commodity product derived from a transgenic plant, seed, or parts thereof, of the invention. In some embodiments, the commodity product is selected from the group consisting of whole or processed seeds, beans, grains, kernels, hulls, meals, grits, flours, sugars, sugars, starches, protein concentrates, protein isolates, waxes, oils, extracts, juices, concentrates, liquids, syrups, feed, silage, fiber, paper or other food or product produced from plants. In some embodiments, the commodity product consists of whole seeds and comprises a nucleic acid that is or encodes at least one strand of a dsRNA of the invention. In some embodiments, the biological sample or commodity product is toxic to insects. In some embodiments, the transgenic plant is a transgenic canola plant.

[0230] The invention further encompasses a method of controlling a Coleopteran insect or a flea beetle comprising contacting the insect with a nucleic acid molecule that is or is capable of producing an interfering RNA molecule of the invention for inhibiting expression of a target gene in the insect thereby controlling the Coleopteran insect or the flea beetle. In some embodiments, the target gene comprises a coding sequence (i) having at least 80% identity, at least 85% identity, at least 86% identity, at least 87% identity, at least 88% identity, at least 89% identity, at least 90% identity, at least 91% identity, at least 92% identity, at least 93% identity, at least 94% identity, at least 95% identity, at least 96% identity, at least 97% identity, at least 98% identity, at least 99% identity, or 100% identity, to at least a 19, at least a 20, at least a 21, at least a 22, at least a 23, at least a 24, at least a 25, at least a 26, at least a 27, at least a 28, at least a 29, at least a 30, at least a 35, at least a 40, at least a 45, at least a 50, at least a 55, at least a 60, at least a 65, at least a 70, at least a 75, at least a 80, at least a 85, at least a 90, at least a 95, at least a 100, at least a 110, at least a 120, at least a 130, at least a 140, at least a 150, at least a 160, at least a 170, at least a 180, at least a 190, at least a 200, at least a 210, at least a 220, at least a 230, at least a 240, at least a 250, at least a 260, at least a 270, at least a 280, at least a 290, or at least a 300 contiguous nucleotide fragment of SEQ ID NO: 1-102, or a complement thereof; (ii) comprising at least a 19, at least a 20, at least a 21, at least a 22, at least a 23, at least a 24, at least a 25, at least a 26, at least a 27, at least a 28, at least a 29, at least a 30, at least a 35, at least a 40, at least a 45, at least a 50, at least a 55, at least a 60, at least a 65, at least a 70, at least a 75, at least a 80, at least a 85, at least a 90, at least a 95, at least a 100, at least a 110, at least a 120, at least a 130, at least a 140, at least a 150, at least a 160, at least a 170, at least a 180, at least a 190, at least a 200, at least a 210, at least a 220, at least a 230, at least a 240, at least a 250, at least a 260, at least a 270, at least a 280, at least a 290, or at least a 300 contiguous nucleotide fragment of SEQ ID NO: 1-102, or a complement thereof; (iii) comprising at least a 19, at least a 20, at least a 21, at least a 22, at least a 23, at least a 24, at least a 25, at least a 26, at least a 27, at least a 28, at least a 29, at least a 30, at least a 35, at least a 40, at least a 45, at least a 50, at least a 55, at least a 60, at least a 65, at least a 70, at least a 75, at least a 80, at least a 85, at least a 90, at least a 95, at least a 100, at least a 110, at least a 120, at least a 130, at least a 140, at least a 150, at least a 160, at least a 170, at least a 180, at least a 190, at least a 200, at least a 210, at least a 220, at least a 230, at least a 240, at least a 250, at least a 260, at least a 270, at least a 280, at least a 290, or at least a 300 contiguous nucleotide fragment of a nucleotide sequence encoding an amino acid sequence encoded by SEQ ID NO: 1-102, or a complement thereof. In some embodiments the target gene coding sequence comprises SEQ ID NO: 1-102, or a complement thereof, or can hybridize under stringent conditions to a polynucleotide selected from the group consisting of SEQ ID NO: 1-102, and the complements thereof. In other embodiments, the interfering RNA molecule of the invention is complementary to a portion of a mRNA polynucleotide transcribable from the flea beetle target genes described herein.

[0231] In some embodiments of the method of controlling a Coleopteran insect pest or a flea beetle pest, the interfering RNA molecule of the invention comprises at least one dsRNA, wherein the dsRNA is a region of double-stranded RNA comprising annealed complementary strands, one strand of which comprises a sequence of at least 19 contiguous nucleotides which (i) has at least 80% identity, at least 85% identity, at least 86% identity, at least 87% identity, at least 88% identity, at least 89% identity, at least 90% identity, at least 91% identity, at least 92% identity, at least 93% identity, at least 94% identity, at least 95% identity, at least 96% identity, at least 97% identity, at least 98% identity, at least 99% identity, or 100% identity, to at least a 19, at least a 20, at least a 21, at least a 22, at least a 23, at least a 24, at least a 25, at least a 26, at least a 27, at least a 28, at least a 29, at least a 30, at least a 35, at least a 40, at least a 45, at least a 50, at least a 55, at least a 60, at least a 65, at least a 70, at least a 75, at least a 80, at least a 85, at least a 90, at least a 95, at least a 100, at least a 110, at least a 120, at least a 130, at least a 140, at least a 150, at least a 160, at least a 170, at least a 180, at least a 190, at least a 200, at least a 210, at least a 220, at least a 230, at least a 240, at least a 250, at least a 260, at least a 270, at least a 280, at least a 290, or at least a 300 contiguous nucleotide fragment of SEQ ID NO: 409-612, or the complement thereof; or (ii) comprises at least a 19, at least a 20, at least a 21, at least a 22, at least a 23, at least a 24, at least a 25, at least a 26, at least a 27, at least a 28, at least a 29, at least a 30, at least a 35, at least a 40, at least a 45, at least a 50, at least a 55, at least a 60, at least a 65, at least a 70, at least a 75, at least a 80, at least a 85, at least a 90, at least a 95, at least a 100, at least a 110, at least a 120, at least a 130, at least a 140, at least a 150, at least a 160, at least a 170, at least a 180, at least a 190, at least a 200, at least a 210, at least a 220, at least a 230, at least a 240, at least a 250, at least a 260, at least a 270, at least a 280, at least a 290, or at least a 300 contiguous nucleotide fragment of SEQ ID NO: 409-612, or the complement thereof; (iii) comprises at least a 19, at least a 20, at least a 21, at least a 22, at least a 23, at least a 24, at least a 25, at least a 26, at least a 27, at least a 28, at least a 29, at least a 30, at least a 35, at least a 40, at least a 45, at least a 50, at least a 55, at least a 60, at least a a 65, at least a 70, at least a 75, at least a 80, at least a 85, at least a 90, at least a 95, at least a 100, at least a 110, at least a 120, at least a 130, at least a 140, at least a 150, at least a 160, at least a 170, at least a 180, at least a 190, at least a 200, at least a 210, at least a 220, at least a 230, at least a 240, at least a 250, at least a 260, at least a 270, at least a 280, at least a 290, or at least a 300 contiguous nucleotide fragment of a nucleotide sequence encoding an amino acid sequence encoded by SEQ ID NO: 409-612, or the complement thereof, or (iv) can hybridize under stringent conditions to a polynucleotide selected from the group consisting of SEQ ID NO: 409-612, and the complements thereof.

[0232] In some embodiments of the method of controlling a Coleopteran insect pest or a flea beetle pest, the interfering RNA molecule comprises, consists essentially of or consists of from 18, 19, 20 or 21 consecutive nucleotides to at least about 300 consecutive nucleotides of SEQ ID NO: 409-612. In other embodiments of the methods of the invention, the interfering RNA molecule of the invention comprises a dsRNA which comprises, consists essentially of or consists of any 21-mer subsequence of SEQ ID NO: 409-510 consisting of N to N+20 nucleotides, or any complement thereof. For example, an interfering RNA molecule of the invention comprises a dsRNA which comprises, consist essentially of or consists of any 21-mer subsequence of SEQ ID NO: 409, wherein N is nucleotide 1 to nucleotide 784 of SEQ ID NO: 409, or any complement thereof. In other words, the portion of the mRNA that is targeted comprises any of the 784 21 consecutive nucleotide subsequences i.e. 21-mers) of SEQ ID NO: 409, or any of their complementing sequences. It will be recognized that these 784 21 consecutive nucleotide subsequences include all possible 21 consecutive nucleotide subsequences from SEQ ID NO: 409 and from SEQ ID NO: 511, and their complements, as SEQ ID NO's 409 and 511 are all to the same target, namely Pa1, which also may be referred to as a P. armoraciae ortholog of Rpn12. It will similarly be recognized that all 21-mer subsequences of SEQ ID NO: 409-510 and all complement subsequences thereof, include all possible 21 consecutive nucleotide subsequences of SEQ ID NO: 511-612, and the complement subsequences thereof.

[0233] Similarly, in some embodiments of the method of controlling a Coleopteran insect pest or a flea beetle pest, an interfering RNA molecule of the invention comprises a dsRNA which comprises, consist essentially of or consists of any 21-mer subsequence of SEQ ID NO: 410, wherein N is nucleotide 1 to nucleotide 436 of SEQ ID NO: 410, or any complement thereof. Another interfering RNA molecule of the invention comprises a dsRNA which comprises, consist essentially of or consists of any 21-mer subsequence of SEQ ID NO: 411, wherein N is nucleotide 1 to nucleotide 752 of SEQ ID NO: 411, or any complement thereof. Another interfering RNA molecule of the invention comprises a dsRNA which comprises, consist essentially of or consists of any 21-mer subsequence of SEQ ID NO: 412, wherein N is nucleotide 1 to nucleotide 811 of SEQ ID NO: 412, or any complement thereof. Another interfering RNA molecule of the invention comprises a dsRNA which comprises, consist essentially of or consists of any 21-mer subsequence of SEQ ID NO: 413, wherein N is nucleotide 1 to nucleotide 556 of SEQ ID NO: 413, or any complement thereof. Another interfering RNA molecule of the invention comprises a dsRNA which comprises, consist essentially of or consists of any 21-mer subsequence of SEQ ID NO: 414, wherein N is nucleotide 1 to nucleotide 442 of SEQ ID NO: 414, or any complement thereof. Another interfering RNA molecule of the invention comprises a dsRNA which comprises, consist essentially of or consists of any 21-mer subsequence of SEQ ID NO: 415, wherein N is nucleotide 1 to nucleotide 850 of SEQ ID NO: 415, or any complement thereof. Another interfering RNA molecule of the invention comprises a dsRNA which comprises, consist essentially of or consists of any 21-mer subsequence of SEQ ID NO: 416, wherein N is nucleotide 1 to nucleotide 352 of SEQ ID NO: 416, or any complement thereof. Another interfering RNA molecule of the invention comprises a dsRNA which comprises, consist essentially of or consists of any 21-mer subsequence of SEQ ID NO: 417, wherein N is nucleotide 1 to nucleotide 334 of SEQ ID NO: 417, or any complement thereof. Another interfering RNA molecule of the invention comprises a dsRNA which comprises, consist essentially of or consists of any 21-mer subsequence of SEQ ID NO: 418, wherein N is nucleotide 1 to nucleotide 355 of SEQ ID NO: 418, or any complement thereof. Another interfering RNA molecule of the invention comprises a dsRNA which comprises, consist essentially of or consists of any 21-mer subsequence of SEQ ID NO: 419, wherein N is nucleotide 1 to nucleotide 5674 of SEQ ID NO: 419, or any complement thereof. Another interfering RNA molecule of the invention comprises a dsRNA which comprises, consist essentially of or consists of any 21-mer subsequence of SEQ ID NO: 420, wherein N is nucleotide 1 to nucleotide 511 of SEQ ID NO: 420, or any complement thereof. Another interfering RNA molecule of the invention comprises a dsRNA which comprises, consist essentially of or consists of any 21-mer subsequence of SEQ ID NO: 421, wherein N is nucleotide 1 to nucleotide 388 of SEQ ID NO: 421, or any complement thereof. Another interfering RNA molecule of the invention comprises a dsRNA which comprises, consist essentially of or consists of any 21-mer subsequence of SEQ ID NO: 422, wherein N is nucleotide 1 to nucleotide 385 of SEQ ID NO: 422, or any complement thereof. Another interfering RNA molecule of the invention comprises a dsRNA which comprises, consist essentially of or consists of any 21-mer subsequence of SEQ ID NO: 423, wherein N is nucleotide 1 to nucleotide 400 of SEQ ID NO: 423, or any complement thereof. Another interfering RNA molecule of the invention comprises a dsRNA which comprises, consist essentially of or consists of any 21-mer subsequence of SEQ ID NO: 424, wherein N is nucleotide 1 to nucleotide 1702 of SEQ ID NO: 424, or any complement thereof. Another interfering RNA molecule of the invention comprises a dsRNA which comprises, consist essentially of or consists of any 21-mer subsequence of SEQ ID NO: 425, wherein N is nucleotide 1 to nucleotide 3973 of SEQ ID NO: 425, or any complement thereof. Another interfering RNA molecule of the invention comprises a dsRNA which comprises, consist essentially of or consists of any 21-mer subsequence of SEQ ID NO: 426, wherein N is nucleotide 1 to nucleotide 784 of SEQ ID NO: 426, or any complement thereof. Another interfering RNA molecule of the invention comprises a dsRNA which comprises, consist essentially of or consists of any 21-mer subsequence of SEQ ID NO: 427, wherein N is nucleotide 1 to nucleotide 436 of SEQ ID NO: 427, or any complement thereof. Another interfering RNA molecule of the invention comprises a dsRNA which comprises, consist essentially of or consists of any 21-mer subsequence of SEQ ID NO: 428, wherein N is nucleotide 1 to nucleotide 787 of SEQ ID NO: 428, or any complement thereof. Another interfering RNA molecule of the invention comprises a dsRNA which comprises, consist essentially of or consists of any 21-mer subsequence of SEQ ID NO: 429, wherein N is nucleotide 1 to nucleotide 805 of SEQ ID NO: 429, or any complement thereof. Another interfering RNA molecule of the invention comprises a dsRNA which comprises, consist essentially of or consists of any 21-mer subsequence of SEQ ID NO: 430, wherein N is nucleotide 1 to nucleotide 562 of SEQ ID NO: 430, or any complement thereof. Another interfering RNA molecule of the invention comprises a dsRNA which comprises, consist essentially of or consists of any 21-mer subsequence of SEQ ID NO: 431, wherein N is nucleotide 1 to nucleotide 439 of SEQ ID NO: 431, or any complement thereof. Another interfering RNA molecule of the invention comprises a dsRNA which comprises, consist essentially of or consists of any 21-mer subsequence of SEQ ID NO: 432, wherein N is nucleotide 1 to nucleotide 856 of SEQ ID NO: 432, or any complement thereof. Another interfering RNA molecule of the invention comprises a dsRNA which comprises, consist essentially of or consists of any 21-mer subsequence of SEQ ID NO: 433, wherein N is nucleotide 1 to nucleotide 352 of SEQ ID NO: 433, or any complement thereof. Another interfering RNA molecule of the invention comprises a dsRNA which comprises, consist essentially of or consists of any 21-mer subsequence of SEQ ID NO: 434, wherein N is nucleotide 1 to nucleotide 334 of SEQ ID NO: 434, or any complement thereof. Another interfering RNA molecule of the invention comprises a dsRNA which comprises, consist essentially of or consists of any 21-mer subsequence of SEQ ID NO: 435, wherein N is nucleotide 1 to nucleotide 355 of SEQ ID NO: 435, or any complement thereof. Another interfering RNA molecule of the invention comprises a dsRNA which comprises, consist essentially of or consists of any 21-mer subsequence of SEQ ID NO: 436, wherein N is nucleotide 1 to nucleotide 5674 of SEQ ID NO: 436, or any complement thereof. Another interfering RNA molecule of the invention comprises a dsRNA which comprises, consist essentially of or consists of any 21-mer subsequence of SEQ ID NO: 437, wherein N is nucleotide 1 to nucleotide 511 of SEQ ID NO: 437, or any complement thereof. Another interfering RNA molecule of the invention comprises a dsRNA which comprises, consist essentially of or consists of any 21-mer subsequence of SEQ ID NO: 438, wherein N is nucleotide 1 to nucleotide 388 of SEQ ID NO: 438, or any complement thereof. Another interfering RNA molecule of the invention comprises a dsRNA which comprises, consist essentially of or consists of any 21-mer subsequence of SEQ ID NO: 439, wherein N is nucleotide 1 to nucleotide 385 of SEQ ID NO: 439, or any complement thereof. Another interfering RNA molecule of the invention comprises a dsRNA which comprises, consist essentially of or consists of any 21-mer subsequence of SEQ ID NO: 440, wherein N is nucleotide 1 to nucleotide 400 of SEQ ID NO: 440, or any complement thereof. Another interfering RNA molecule of the invention comprises a dsRNA which comprises, consist essentially of or consists of any 21-mer subsequence of SEQ ID NO: 441, wherein N is nucleotide 1 to nucleotide 2047 of SEQ ID NO: 441, or any complement thereof. Another interfering RNA molecule of the invention comprises a dsRNA which comprises, consist essentially of or consists of any 21-mer subsequence of SEQ ID NO: 442, wherein N is nucleotide 1 to nucleotide 3964 of SEQ ID NO: 442, or any complement thereof. Another interfering RNA molecule of the invention comprises a dsRNA which comprises, consist essentially of or consists of any 21-mer subsequence of SEQ ID NO: 443, wherein N is nucleotide 1 to nucleotide 784 of SEQ ID NO: 443, or any complement thereof. Another interfering RNA molecule of the invention comprises a dsRNA which comprises, consist essentially of or consists of any 21-mer subsequence of SEQ ID NO: 444, wherein N is nucleotide 1 to nucleotide 436 of SEQ ID NO: 444, or any complement thereof. Another interfering RNA molecule of the invention comprises a dsRNA which comprises, consist essentially of or consists of any 21-mer subsequence of SEQ ID NO: 445, wherein N is nucleotide 1 to nucleotide 787 of SEQ ID NO: 445, or any complement thereof. Another interfering RNA molecule of the invention comprises a dsRNA which comprises, consist essentially of or consists of any 21-mer subsequence of SEQ ID NO: 446, wherein N is nucleotide 1 to nucleotide 811 of SEQ ID NO: 446, or any complement thereof. Another interfering RNA molecule of the invention comprises a dsRNA which comprises, consist essentially of or consists of any 21-mer subsequence of SEQ ID NO: 447, wherein N is nucleotide 1 to nucleotide 487 of SEQ ID NO: 447, or any complement thereof. Another interfering RNA molecule of the invention comprises a dsRNA which comprises, consist essentially of or consists of any 21-mer subsequence of SEQ ID NO: 448, wherein N is nucleotide 1 to nucleotide 406 of SEQ ID NO: 448, or any complement thereof. Another interfering RNA molecule of the invention comprises a dsRNA which comprises, consist essentially of or consists of any 21-mer subsequence of SEQ ID NO: 449, wherein N is nucleotide 1 to nucleotide 856 of SEQ ID NO: 449, or any complement thereof. Another interfering RNA molecule of the invention comprises a dsRNA which comprises, consist essentially of or consists of any 21-mer subsequence of SEQ ID NO: 450, wherein N is nucleotide 1 to nucleotide 251 of SEQ ID NO: 450, or any complement thereof. Another interfering RNA molecule of the invention comprises a dsRNA which comprises, consist essentially of or consists of any 21-mer subsequence of SEQ ID NO: 451, wherein N is nucleotide 1 to nucleotide 334 of SEQ ID NO: 451, or any complement thereof. Another interfering RNA molecule of the invention comprises a dsRNA which comprises, consist essentially of or consists of any 21-mer subsequence of SEQ ID NO: 452, wherein N is nucleotide 1 to nucleotide 355 of SEQ ID NO: 452, or any complement thereof. Another interfering RNA molecule of the invention comprises a dsRNA which comprises, consist essentially of or consists of any 21-mer subsequence of SEQ ID NO: 453, wherein N is nucleotide 1 to nucleotide 5674 of SEQ ID NO: 453, or any complement thereof. Another interfering RNA molecule of the invention comprises a dsRNA which comprises, consist essentially of or consists of any 21-mer subsequence of SEQ ID NO: 454, wherein N is nucleotide 1 to nucleotide 511 of SEQ ID NO: 454, or any complement thereof. Another interfering RNA molecule of the invention comprises a dsRNA which comprises, consist essentially of or consists of any 21-mer subsequence of SEQ ID NO: 455, wherein N is nucleotide 1 to nucleotide 388 of SEQ ID NO: 455, or any complement thereof. Another interfering RNA molecule of the invention comprises a dsRNA which comprises, consist essentially of or consists of any 21-mer subsequence of SEQ ID NO: 456, wherein N is nucleotide 1 to nucleotide 385 of SEQ ID NO: 456, or any complement thereof. Another interfering RNA molecule of the invention comprises a dsRNA which comprises, consist essentially of or consists of any 21-mer subsequence of SEQ ID NO: 457, wherein N is nucleotide 1 to nucleotide 400 of SEQ ID NO: 457, or any complement thereof. Another interfering RNA molecule of the invention comprises a dsRNA which comprises, consist essentially of or consists of any 21-mer subsequence of SEQ ID NO: 458, wherein N is nucleotide 1 to nucleotide 1189 of SEQ ID NO: 458, or any complement thereof. Another interfering RNA molecule of the invention comprises a dsRNA which comprises, consist essentially of or consists of any 21-mer subsequence of SEQ ID NO: 459, wherein N is nucleotide 1 to nucleotide 3514 of SEQ ID NO: 459, or any complement thereof. Another interfering RNA molecule of the invention comprises a dsRNA which comprises, consist essentially of or consists of any 21-mer subsequence of SEQ ID NO: 460, wherein N is nucleotide 1 to nucleotide 784 of SEQ ID NO: 460, or any complement thereof. Another interfering RNA molecule of the invention comprises a dsRNA which comprises, consist essentially of or consists of any 21-mer subsequence of SEQ ID NO: 461, wherein N is nucleotide 1 to nucleotide 436 of SEQ ID NO: 461, or any complement thereof. Another interfering RNA molecule of the invention comprises a dsRNA which comprises, consist essentially of or consists of any 21-mer subsequence of SEQ ID NO: 462, wherein N is nucleotide 1 to nucleotide 787 of SEQ ID NO: 462, or any complement thereof. Another interfering RNA molecule of the invention comprises a dsRNA which comprises, consist essentially of or consists of any 21-mer subsequence of SEQ ID NO: 463, wherein N is nucleotide 1 to nucleotide 811 of SEQ ID NO: 463, or any complement thereof. Another interfering RNA molecule of the invention comprises a dsRNA which comprises, consist essentially of or consists of any 21-mer subsequence of SEQ ID NO: 464, wherein N is nucleotide 1 to nucleotide 556 of SEQ ID NO: 464, or any complement thereof. Another interfering RNA molecule of the invention comprises a dsRNA which comprises, consist essentially of or consists of any 21-mer subsequence of SEQ ID NO: 465, wherein N is nucleotide 1 to nucleotide 439 of SEQ ID NO: 465, or any complement thereof. Another interfering RNA molecule of the invention comprises a dsRNA which comprises, consist essentially of or consists of any 21-mer subsequence of SEQ ID NO: 466, wherein N is nucleotide 1 to nucleotide 856 of SEQ ID NO: 466, or any complement thereof. Another interfering RNA molecule of the invention comprises a dsRNA which comprises, consist essentially of or consists of any 21-mer subsequence of SEQ ID NO: 467, wherein N is nucleotide 1 to nucleotide 352 of SEQ ID NO: 467, or any complement thereof. Another interfering RNA molecule of the invention comprises a dsRNA which comprises, consist essentially of or consists of any 21-mer subsequence of SEQ ID NO: 468, wherein N is nucleotide 1 to nucleotide 334 of SEQ ID NO: 468, or any complement thereof. Another interfering RNA molecule of the invention comprises a dsRNA which comprises, consist essentially of or consists of any 21-mer subsequence of SEQ ID NO: 469, wherein N is nucleotide 1 to nucleotide 355 of SEQ ID NO: 469, or any complement thereof. Another interfering RNA molecule of the invention comprises a dsRNA which comprises, consist essentially of or consists of any 21-mer subsequence of SEQ ID NO: 470, wherein N is nucleotide 1 to nucleotide 5260 of SEQ ID NO: 470, or any complement thereof. Another interfering RNA molecule of the invention comprises a dsRNA which comprises, consist essentially of or consists of any 21-mer subsequence of SEQ ID NO: 471, wherein N is nucleotide 1 to nucleotide 511 of SEQ ID NO: 471, or any complement thereof. Another interfering RNA molecule of the invention comprises a dsRNA which comprises, consist essentially of or consists of any 21-mer subsequence of SEQ ID NO: 472, wherein N is nucleotide 1 to nucleotide 388 of SEQ ID NO: 472, or any complement thereof. Another interfering RNA molecule of the invention comprises a dsRNA which comprises, consist essentially of or consists of any 21-mer subsequence of SEQ ID NO: 473, wherein N is nucleotide 1 to nucleotide 385 of SEQ ID NO: 473, or any complement thereof. Another interfering RNA molecule of the invention comprises a dsRNA which comprises, consist essentially of or consists of any 21-mer subsequence of SEQ ID NO: 474, wherein N is nucleotide 1 to nucleotide 400 of SEQ ID NO: 474, or any complement thereof. Another interfering RNA molecule of the invention comprises a dsRNA which comprises, consist essentially of or consists of any 21-mer subsequence of SEQ ID NO: 475, wherein N is nucleotide 1 to nucleotide 2044 of SEQ ID NO: 475, or any complement thereof. Another interfering RNA molecule of the invention comprises a dsRNA which comprises, consist essentially of or consists of any 21-mer subsequence of SEQ ID NO: 476, wherein N is nucleotide 1 to nucleotide 3511 of SEQ ID NO: 476, or any complement thereof. Another interfering RNA molecule of the invention comprises a dsRNA which comprises, consist essentially of or consists of any 21-mer subsequence of SEQ ID NO: 477, wherein N is nucleotide 1 to nucleotide 784 of SEQ ID NO: 477, or any complement thereof. Another interfering RNA molecule of the invention comprises a dsRNA which comprises, consist essentially of or consists of any 21-mer subsequence of SEQ ID NO: 478, wherein N is nucleotide 1 to nucleotide 412 of SEQ ID NO: 478, or any complement thereof. Another interfering RNA molecule of the invention comprises a dsRNA which comprises, consist essentially of or consists of any 21-mer subsequence of SEQ ID NO: 479, wherein N is nucleotide 1 to nucleotide 676 of SEQ ID NO: 479, or any complement thereof. Another interfering RNA molecule of the invention comprises a dsRNA which comprises, consist essentially of or consists of any 21-mer subsequence of SEQ ID NO: 480, wherein N is nucleotide 1 to nucleotide 811 of SEQ ID NO: 480, or any complement thereof. Another interfering RNA molecule of the invention comprises a dsRNA which comprises, consist essentially of or consists of any 21-mer subsequence of SEQ ID NO: 481, wherein N is nucleotide 1 to nucleotide 556 of SEQ ID NO: 481, or any complement thereof. Another interfering RNA molecule of the invention comprises a dsRNA which comprises, consist essentially of or consists of any 21-mer subsequence of SEQ ID NO: 482, wherein N is nucleotide 1 to nucleotide 439 of SEQ ID NO: 482, or any complement thereof. Another interfering RNA molecule of the invention comprises a dsRNA which comprises, consist essentially of or consists of any 21-mer subsequence of SEQ ID NO: 483, wherein N is nucleotide 1 to nucleotide 856 of SEQ ID NO: 483, or any complement thereof. Another interfering RNA molecule of the invention comprises a dsRNA which comprises, consist essentially of or consists of any 21-mer subsequence of SEQ ID NO: 484, wherein N is nucleotide 1 to nucleotide 352 of SEQ ID NO: 484, or any complement thereof. Another interfering RNA molecule of the invention comprises a dsRNA which comprises, consist essentially of or consists of any 21-mer subsequence of SEQ ID NO: 485, wherein N is nucleotide 1 to nucleotide 334 of SEQ ID NO: 485, or any complement thereof. Another interfering RNA molecule of the invention comprises a dsRNA which comprises, consist essentially of or consists of any 21-mer subsequence of SEQ ID NO: 486, wherein N is nucleotide 1 to nucleotide 361 of SEQ ID NO: 486, or any complement thereof. Another interfering RNA molecule of the invention comprises a dsRNA which comprises, consist essentially of or consists of any 21-mer subsequence of SEQ ID NO: 487, wherein N is nucleotide 1 to nucleotide 5668 of SEQ ID NO: 487, or any complement thereof. Another interfering RNA molecule of the invention comprises a dsRNA which comprises, consist essentially of or consists of any 21-mer subsequence of SEQ ID NO: 488, wherein N is nucleotide 1 to nucleotide 457 of SEQ ID NO: 488, or any complement thereof. Another interfering RNA molecule of the invention comprises a dsRNA which comprises, consist essentially of or consists of any 21-mer subsequence of SEQ ID NO: 489, wherein N is nucleotide 1 to nucleotide 388 of SEQ ID NO: 489, or any complement thereof. Another interfering RNA molecule of the invention comprises a dsRNA which comprises, consist essentially of or consists of any 21-mer subsequence of SEQ ID NO: 490, wherein N is nucleotide 1 to nucleotide 385 of SEQ ID NO: 490, or any complement thereof. Another interfering RNA molecule of the invention comprises a dsRNA which comprises, consist essentially of or consists of any 21-mer subsequence of SEQ ID NO: 491, wherein N is nucleotide 1 to nucleotide 400 of SEQ ID NO: 491, or any complement thereof. Another interfering RNA molecule of the invention comprises a dsRNA which comprises, consist essentially of or consists of any 21-mer subsequence of SEQ ID NO: 492, wherein N is nucleotide 1 to nucleotide 2044 of SEQ ID NO: 492, or any complement thereof. Another interfering RNA molecule of the invention comprises a dsRNA which comprises, consist essentially of or consists of any 21-mer subsequence of SEQ ID NO: 493, wherein N is nucleotide 1 to nucleotide 3970 of SEQ ID NO: 493, or any complement thereof. Another interfering RNA molecule of the invention comprises a dsRNA which comprises, consist essentially of or consists of any 21-mer subsequence of SEQ ID NO: 494, wherein N is nucleotide 1 to nucleotide 784 of SEQ ID NO: 494, or any complement thereof. Another interfering RNA molecule of the invention comprises a dsRNA which comprises, consist essentially of or consists of any 21-mer subsequence of SEQ ID NO: 495, wherein N is nucleotide 1 to nucleotide 436 of SEQ ID NO: 495, or any complement thereof. Another interfering RNA molecule of the invention comprises a dsRNA which comprises, consist essentially of or consists of any 21-mer subsequence of SEQ ID NO: 496, wherein N is nucleotide 1 to nucleotide 787 of SEQ ID NO: 496, or any complement thereof. Another interfering RNA molecule of the invention comprises a dsRNA which comprises, consist essentially of or consists of any 21-mer subsequence of SEQ ID NO: 497, wherein N is nucleotide 1 to nucleotide 811 of SEQ ID NO: 497, or any complement thereof. Another interfering RNA molecule of the invention comprises a dsRNA which comprises, consist essentially of or consists of any 21-mer subsequence of SEQ ID NO: 498, wherein N is nucleotide 1 to nucleotide 487 of SEQ ID NO: 498, or any complement thereof. Another interfering RNA molecule of the invention comprises a dsRNA which comprises, consist essentially of or consists of any 21-mer subsequence of SEQ ID NO: 499, wherein N is nucleotide 1 to nucleotide 439 of SEQ ID NO: 499, or any complement thereof. Another interfering RNA molecule of the invention comprises a dsRNA which comprises, consist essentially of or consists of any 21-mer subsequence of SEQ ID NO: 500, wherein N is nucleotide 1 to nucleotide 856 of SEQ ID NO: 500, or any complement thereof. Another interfering RNA molecule of the invention comprises a dsRNA which comprises, consist essentially of or consists of any 21-mer subsequence of SEQ ID NO: 501, wherein N is nucleotide 1 to nucleotide 352 of SEQ ID NO: 501, or any complement thereof. Another interfering RNA molecule of the invention comprises a dsRNA which comprises, consist essentially of or consists of any 21-mer subsequence of SEQ ID NO: 502, wherein N is nucleotide 1 to nucleotide 334 of SEQ ID NO: 502, or any complement thereof. Another interfering RNA molecule of the invention comprises a dsRNA which comprises, consist essentially of or consists of any 21-mer subsequence of SEQ ID NO: 503, wherein N is nucleotide 1 to nucleotide 355 of SEQ ID NO: 503, or any complement thereof. Another interfering RNA molecule of the invention comprises a dsRNA which comprises, consist essentially of or consists of any 21-mer subsequence of SEQ ID NO: 504, wherein N is nucleotide 1 to nucleotide 4528 of SEQ ID NO: 504, or any complement thereof. Another interfering RNA molecule of the invention comprises a dsRNA which comprises, consist essentially of or consists of any 21-mer subsequence of SEQ ID NO: 505, wherein N is nucleotide 1 to nucleotide 511 of SEQ ID NO: 505, or any complement thereof. Another interfering RNA molecule of the invention comprises a dsRNA which comprises, consist essentially of or consists of any 21-mer subsequence of SEQ ID NO: 506, wherein N is nucleotide 1 to nucleotide 388 of SEQ ID NO: 506, or any complement thereof. Another interfering RNA molecule of the invention comprises a dsRNA which comprises, consist essentially of or consists of any 21-mer subsequence of SEQ ID NO: 507, wherein N is nucleotide 1 to nucleotide 385 of SEQ ID NO: 507, or any complement thereof. Another interfering RNA molecule of the invention comprises a dsRNA which comprises, consist essentially of or consists of any 21-mer subsequence of SEQ ID NO: 508, wherein N is nucleotide 1 to nucleotide 400 of SEQ ID NO: 508, or any complement thereof. Another interfering RNA molecule of the invention comprises a dsRNA which comprises, consist essentially of or consists of any 21-mer subsequence of SEQ ID NO: 509, wherein N is nucleotide 1 to nucleotide 1939 of SEQ ID NO: 509, or any complement thereof. Another interfering RNA molecule of the invention comprises a dsRNA which comprises, consist essentially of or consists of any 21-mer subsequence of SEQ ID NO: 510, wherein N is nucleotide 1 to nucleotide 3970 of SEQ ID NO: 510, or any complement thereof.

[0234] In some embodiments of the method of controlling a flea beetle insect pest, the insect is from the tribe Alticini. In further embodiments, the insect is a species of a genus selected from the group consisting of the genera Altica, Anthobiodes, Aphthona, Aphthonaltica, Aphthonoides, Apteopeda, Argopistes, Argopus, Arrhenocoela, Batophila, Blepharida, Chaetocnema, Clitea, Crepidodera, Derocrepis, Dibolia, Disonycha, Epitrix, Hermipyxis, Hermaeophaga, Hespera, Hippuriphila, Horaia, Hyphasis, Lipromima, Liprus, Longitarsus, Luperomorpha, Lythraria, Manobia, Mantura, Meishania, Minota, Mniophila, Neicrepidodera, Nonarthra, Novofoudrasia, Ochrosis, Oedionychis, Oglobinia, Omeisphaera, Ophrida, Orestia, Paragopus, Pentamesa, Philopona, Phygasia, Phyllotreta, Podagrica, Podagricomela, Podontia, Pseudodera, Psylliodes, Sangariola, Sinaltica, Sphaeroderma, Systena, Trachyaphthona, Xuthea, and Zipangia. In embodiments, the insect is a species selected from the group consisting of Altica ambiens (alder flea beetle), Altica canadensis (prairie flea beetle), Altica chalybaea (grape flea beetle), Altica prasina (poplar flea beetle), Altica rosae (rose flea beetle), Altica sylvia (blueberry flea beetle), Altica ulmi (elm flea beetle), Chaetocnema pulicaria (corn flea beetle), Chaetocnema conofinis (sweet potato flea beetle), Epitrix cucumeris (potato flea beetle), Systena blanda (palestripped flea beetle), and Systena frontalis (redheaded flea beetle). In embodiments, the insect is a species selected from the group consisting of Phyllotreta armoraciae (horseradish flea beetle), Phyllotreta cruciferae (canola flea beetle), Phyllotreta pusilla (western black flea beetle), Phyllotreta nemorum (striped turnip flea beetle), Phyllotreta atra (turnip flea beetle), Phyllotreta robusta (garden flea beetle), Phyllotreta striolata (striped flea beetle), Phyllotreta undulata, Psylliodes chrysocephala, and Psylliodes punctulata (hop flea beetle).

[0235] In other embodiments of the method of controlling a Coleopteran insect pest or a flea beetle pest, the contacting comprises (a) planting a transgenic seed capable of producing a transgenic plant that expresses the nucleic acid molecule, wherein the insect feeds on the transgenic plant, or part thereof; or (b) applying a composition comprising the nucleic acid molecule to a seed or plant, or part thereof, wherein the insect feeds on the seed, the plant, or a part thereof. In some embodiments, the transgenic seed and the transgenic plant is a canola seed or a canola plant. In other embodiments the seed or plant is a canola seed or a canola plant.

[0236] The invention also encompasses a method of controlling a flea beetle comprising contacting the flea beetle with a nucleic acid molecule that is or is capable of producing the interfering RNA molecule of the invention for inhibiting expression of a target gene in the flea beetle, and also contacting the flea beetle with at least a second insecticidal agent for controlling the flea beetle, wherein said second insecticidal agent comprises a B. thuringiensis insecticidal protein, thereby controlling the flea beetle. The invention also encompasses a method for controlling flea beetle pests on a plant, comprising topically applying to said plant a pesticide composition comprising an interfering RNA of the invention and at least a second insecticidal agent for controlling the flea beetle, wherein said second insecticidal agent does not comprise a B. thuringiensis insecticidal protein, and providing said plant in the diet of said flea beetle. The invention also encompasses a method wherein the second insecticidal agent comprises a patatin, a protease, a protease inhibitor, a urease, an alpha-amylase inhibitor, a pore-forming protein, a lectin, an engineered antibody or antibody fragment, or a chitinase. The second insecticidal agent may also be a Bacillus cereus insecticidal protein, a Xenorhabdus spp. insecticidal protein, a Photorhabdus spp. insecticidal protein, a Brevibacillus laterosporous insecticidal protein, a Lysinibacillus sphearicus insecticidal protein, a Chromobacterium ssp. insecticidal protein, a Yersinia entomophaga insecticidal protein, a Paenibacillus popiliae insecticidal protein, or a Clostridium spp. insecticidal protein.

[0237] The invention also encompasses a method of reducing an adult Coleopteran insect population or an adult flea beetle population on a transgenic plant expressing a Cry protein, a hybrid Cry protein or modified Cry protein comprising expressing in the transgenic plant a nucleic acid molecule that is or is capable of producing an interfering RNA molecule of the invention capable of inhibiting expression of a target gene as described herein in an adult insect, thereby reducing the adult Coleopteran insect population or adult flea beetle population.

[0238] In some embodiments, the invention encompasses a method of reducing the level of a target mRNA transcribable from a target gene as described herein in a Coleopteran insect or a flea beetle comprising contacting the insect with a composition comprising the interfering RNA molecule of the invention, wherein the interfering RNA molecule reduces the level of the target mRNA in a cell of the insect. In some embodiments, the interfering RNA of the method comprises at least one dsRNA, wherein the dsRNA is a region of double-stranded RNA comprising annealed complementary strands, one strand of which comprises a sequence of at least 19 contiguous nucleotides which (i) has at least 80% identity, at least 85% identity, at least 86% identity, at least 87% identity, at least 88% identity, at least 89% identity, at least 90% identity, at least 91% identity, at least 92% identity, at least 93% identity, at least 94% identity, at least 95% identity, at least 96% identity, at least 97% identity, at least 98% identity, at least 99% identity, or 100% identity, to at least a 19, at least a 20, at least a 21, at least a 22, at least a 23, at least a 24, at least a 25, at least a 26, at least a 27, at least a 28, at least a 29, at least a 30, at least a 35, at least a 40, at least a 45, at least a 50, at least a 55, at least a 60, at least a 65, at least a 70, at least a 75, at least a 80, at least a 85, at least a 90, at least a 95, at least a 100, at least a 110, at least a 120, at least a 130, at least a 140, at least a 150, at least a 160, at least a 170, at least a 180, at least a 190, at least a 200, at least a 210, at least a 220, at least a 230, at least a 240, at least a 250, at least a 260, at least a 270, at least a 280, at least a 290, or at least a 300 contiguous nucleotide fragment of SEQ ID NO: 409-612, or the complement thereof; (ii) comprises at least a 19, at least a 20, at least a 21, at least a 22, at least a 23, at least a 24, at least a 25, at least a 26, at least a 27, at least a 28, at least a 29, at least a 30, at least a 35, at least a 40, at least a 45, at least a 50, at least a 55, at least a 60, at least a 65, at least a 70, at least a 75, at least a 80, at least a 85, at least a 90, at least a 95, at least a 100, at least a 110, at least a 120, at least a 130, at least a 140, at least a 150, at least a 160, at least a 170, at least a 180, at least a 190, at least a 200, at least a 210, at least a 220, at least a 230, at least a 240, at least a 250, at least a 260, at least a 270, at least a 280, at least a 290, or at least a 300 contiguous nucleotide fragment of SEQ ID NO: 409-612, or the complement thereof; (iii) comprises at least a 19, at least a 20, at least a 21, at least a 22, at least a 23, at least a 24, at least a 25, at least a 26, at least a 27, at least a 28, at least a 29, at least a 30, at least a 35, at least a 40, at least a 45, at least a 50, at least a 55, at least a 60, at least a a 65, at least a 70, at least a 75, at least a 80, at least a 85, at least a 90, at least a 95, at least a 100, at least a 110, at least a 120, at least a 130, at least a 140, at least a 150, at least a 160, at least a 170, at least a 180, at least a 190, at least a 200, at least a 210, at least a 220, at least a 230, at least a 240, at least a 250, at least a 260, at least a 270, at least a 280, at least a 290, or at least a 300 contiguous nucleotide fragment of a nucleotide sequence encoding an amino acid sequence encoded by SEQ ID NO: 409-612, or the complement thereof, or (iv) can hybridize under stringent conditions to a polynucleotide selected from the group consisting of SEQ ID NO: 409-612, and the complements thereof, wherein the interfering RNA molecule has insecticidal activity against the target Coleopteran insect or a flea beetle. In another embodiment, the contacting is achieved by the target insect feeding on the composition. In other embodiments, production of the protein encoded by the target mRNA is reduced. In other embodiments, the target protein comprises an amino acid having at least about 80%, at least about 85%, at least about 90%, at least about 91%, at least about 92%, at least about 93%, at least about 94%, at least about 95%, at least about 96%, at least about 97%, at least about 98% or at least about 99% identity to SEQ ID NO: 613-714. In other embodiments the target protein comprises SEQ ID NO: 613-714. In other embodiments, the interfering RNA is contacted with a Coleopteran insect or a flea beetle through a transgenic organism expressing the interfering RNA. In other embodiments, the transgenic organism is a transgenic plant, a transgenic microorganism, a transgenic bacterium or a transgenic endophyte. In other embodiments, the interfering RNA is contacted with a Coleopteran insect or a flea beetle by topically applying an interfering RNA in an acceptable agricultural carrier to a plant or plant part on which the insect feeds. In some embodiments, the interfering RNA that reduces the level of a target mRNA transcribable from a target gene described herein is lethal to the Coleopteran insect or flea beetle. In some embodiments, the flea beetle a member of the Alticini tribe. In some embodiments, the flea beetle is a species of a genus selected from the group consisting of the genera Altica, Anthobiodes, Aphthona, Aphthonaltica, Aphthonoides, Apteopeda, Argopistes, Argopus, Arrhenocoela, Batophila, Blepharida, Chaetocnema, Clitea, Crepidodera, Derocrepis, Dibolia, Disonycha, Epitrix, Hermipyxis, Hermaeophaga, Hespera, Hippuriphila, Horaia, Hyphasis, Lipromima, Liprus, Longitarsus, Luperomorpha, Lythraria, Manobia, Mantura, Meishania, Minota, Mniophila, Neicrepidodera, Nonarthra, Novofoudrasia, Ochrosis, Oedionychis, Oglobinia, Omeisphaera, Ophrida, Orestia, Paragopus, Pentamesa, Philopona, Phygasia, Phyllotreta, Podagrica, Podagricomela, Podontia, Pseudodera, Psylliodes, Sangariola, Sinaltica, Sphaeroderma, Systena, Trachyaphthona, Xuthea, and Zipangia. In embodiments, the insect is a species selected from the group consisting of Altica ambiens (alder flea beetle), Altica canadensis (prairie flea beetle), Altica chalybaea (grape flea beetle), Altica prasina (poplar flea beetle), Altica rosae (rose flea beetle), Altica sylvia (blueberry flea beetle), Altica ulmi (elm flea beetle), Chaetocnema pulicaria (corn flea beetle), Chaetocnema conofinis (sweet potato flea beetle), Epitrix cucumeris (potato flea beetle), Systena blanda (palestripped flea beetle), and Systena frontalis (redheaded flea beetle). In embodiments, the insect is a species selected from the group consisting of Phyllotreta armoraciae (horseradish flea beetle), Phyllotreta cruciferae (canola flea beetle), Phyllotreta pusilla (western black flea beetle), Phyllotreta nemorum (striped turnip flea beetle), Phyllotreta atra (turnip flea beetle), Phyllotreta robusta (garden flea beetle), Phyllotreta striolata (striped flea beetle), Phyllotreta undulata, Psylliodes chrysocephala, and Psylliodes punctulata (hop flea beetle).

[0239] In some embodiments, the invention encompasses a method of conferring Coleopteran insect tolerance or flea beetle tolerance to a plant, or part thereof, comprising introducing into the plant, or part thereof, an interfering RNA molecule, a dsRNA molecule, a nucleic acid construct, a chimeric nucleic acid molecule, an artificial plant microRNA precursor molecule and/or a composition of the invention, wherein the dsRNA molecule, nucleic acid construct, chimeric nucleic acid molecule, artificial plant microRNA precursor molecule and/or composition of the invention are toxic to the insect, thereby conferring tolerance of the plant or part thereof to the Coleopteran insect or flea beetle. In other embodiments, the introducing step is performed by transforming a plant cell and producing the transgenic plant from the transformed plant cell. In still other embodiments, the introducing step is performed by breeding two plants together.

[0240] In other embodiments, the invention encompasses a method of reducing damage to the plant fed upon by a flea beetle, comprising introducing into cells of the plant an interfering RNA molecule, a dsRNA, a nucleic acid molecule, a nucleic acid construct, a chimeric nucleic acid molecule, an artificial plant microRNA precursor molecule and/or a composition of the invention, wherein the dsRNA, nucleic acid molecule, nucleic acid construct, chimeric nucleic acid molecule, artificial plant microRNA precursor molecule and/or composition of the invention are toxic to the flea beetle, thereby reducing damage to the plant. In other embodiments, the introducing step is performed by transforming a plant cell and producing the transgenic plant from the transformed plant cell. In still other embodiments, the introducing step is performed by breeding two plants together.

[0241] In still other embodiments, the invention encompasses a method of producing a transgenic plant cell having toxicity to a Coleopteran insect or flea beetle, comprising introducing into a plant cell an interfering RNA molecule, a dsRNA, a nucleic acid molecule, a nucleic acid construct, a chimeric nucleic acid molecule, an artificial plant microRNA precursor molecule and/or a composition of the invention, thereby producing the transgenic plant cell having toxicity to the insect compared to a control plant cell. In some embodiments, the invention encompasses a plurality of transgenic plant cells produced by this method. In other embodiments, the plurality of transgenic plant cells is grown under conditions which include natural sunlight. In other embodiments, the introducing step is performed by transforming a plant cell and producing the transgenic plant from the transformed plant cell. In still other embodiments, the introducing step is performed by breeding two plants together.

[0242] In some embodiments, the invention encompasses a method of producing a transgenic plant having enhanced tolerance to Coleopteran or flea beetle feeding damage, comprising introducing into a plant an interfering RNA molecule, a dsRNA, a nucleic acid molecule, a nucleic acid construct, a chimeric nucleic acid molecule, an artificial plant microRNA precursor molecule and/or a composition of the invention, thereby producing a transgenic plant having enhanced tolerance to Coleopteran or flea beetle feeding damage compared to a control plant. In other embodiments, the introducing step is performed by transforming a plant cell and producing the transgenic plant from the transformed plant cell. In still other embodiments, the introducing step is performed by breeding two plants together.

[0243] In some embodiments, the invention encompasses a method of providing a canola grower with a means of controlling a Coleopteran insect pest population or a flea beetle pest population in a canola crop comprising (a) selling or providing to the grower transgenic canola seed that comprises an interfering RNA, a nucleic acid molecule, a nucleic acid construct, a chimeric nucleic acid molecule, an artificial plant microRNA precursor molecule and/or a composition of the invention; and (b) advertising to the grower that the transgenic canola seed produce transgenic canola plants that control a Coleopteran or flea beetle pest population.

[0244] In some embodiments, the invention encompasses a method of identifying a target gene for using as a RNAi strategy for the control of a plant pest for RNAi in a Coleopteran plant pest, said method comprising the steps of a) producing a primer pair which can amplify a sequence that is or is orthologous to SEQ ID NO: 1-204, or a complement thereof; b) amplifying an orthologous target from a nucleic acid sample of the plant pest; c) identifying a sequence of an orthologous target gene; d) producing an interfering RNA molecule, wherein the RNA comprises at least one dsRNA, wherein the dsRNA is a region of double-stranded RNA comprising annealed complementary strands, one strand of which comprises a sequence of at least 19 contiguous nucleotides which is at least partially complementary to a target nucleotide sequence within a Coleopteran target gene, is obtained; and e) determining if the interfering RNA molecule has insecticidal activity on the plant pest. If the interfering RNA has insecticidal activity on the Coleopteran pest, a target gene for using in the control of the plant pest has been identified. In some embodiments, the plant pest is a Coleopteran plant pest.

### EXAMPLES

[0245] The invention will be further described by reference to the following detailed examples. These examples are provided for the purposes of illustration only, and are not intended to be limiting unless otherwise specified.

### Example 1: Identification of Potential RNAi Gene Targets in Flea Beetle Species

[0246] This example describes the cloning and sequencing of RNAi target genes and coding sequences from Psylliodes chrysocephala, Phyllotreta nemorum, Phyllotreta striolata, Phyllotreta cruciferae, and from Phyllotreta armoraciae insects.

[0247] Target gene selection was based on known lethal genes in other organisms, which were identified based on published disclosures including WO2012/143543, WO2012/143542, WO2018/026770, WO2018/026773, and WO2018/026774. From this analysis, several targets were identified. Each of these target genes is known to possess an allele(s) which is lethal, or is known to result in lethality when targeted by RNAi, in either Diabrotica virgifera virgifera, Leptinotarsa decemlineata, Lygus hesperus, or a combination thereof. Therefore, each of these targets were considered likely to confer an insecticidal effect when targeted with a dsRNA molecule against the native gene.

[0248] dsRNAs based on the selected targets were produced on an 96 well semi-automated library synthesis platform. Templates for the dsRNA molecules were produced based on publicly available or internally developed transcriptome information for the P. chrysocephala, P. nemorum, P. striolata, P. cruciferae and P. armoraciae targets. All the dsRNA samples tested were produced using primers designed automatically using Primer3, a primer design tool, to synthetize a dsRNA fragment of around 500-600 bp based on the coding sequence of each target gene. Smaller fragments were designed if the size of the coding sequence did not allow a 500 bp fragment.

### Example 2: Identification of Target Genes from Flea Beetle Species

[0249] The dsRNA molecules described above were tested for toxicity against their respective insect pest species in laboratory bioassays. In other words, dsRNAs based on coding sequences from P. chrysocephala were tested against P. chrysocephala insects, dsRNAs based on coding sequences from P. nemorum were tested against P. nemorum insects, dsRNAs based on coding sequences from P. striolata were tested against P. striolata insects, dsRNAs based on coding sequences from P. armoraciae were tested against P. armoraciae insects, and dsRNAs based on coding sequences from P. cruciferae were tested against P. cruciferae insects.

Identification of Target Genes from P. chrysocephala

[0250] Bioassays were performed using an RNA-treated artificial diet method. Briefly, synthesized dsRNA molecules were diluted to the appropriate concentration in a sucrose solution. Samples containing dsRNA and sucrose are heated up to 60° C. An agarose solution was heated to boiling and added to the dsRNA dilutions, leading to final concentrations of 5% sucrose and 0.5% agarose. The agarose solution containing the dsRNA was divided over three petri dishes (diameter=3 cm), the final dose being 67 μg of dsRNA per petri dish. Ten to twelve adults were added to each petri dish to have between 30 and 36 adults per treatment. Each petri dish was maintained at approximately 25° C. and 16:8 light:dark photoperiod. Mortality was recorded at different days post-infestation, with the final survival percentage calculated at 12 days with Abbott correction. dsRNA designed to target green fluorescent protein (GFP) was used as a negative control. Results are depicted in Table 1.

Identification of Target Genes from P. nemorum

[0251] Bioassays were performed using an RNA-treated artificial diet method. Briefly, synthesized dsRNA molecules were diluted to the appropriate concentration in a sucrose solution. Samples containing dsRNA and sucrose are heated up to 60° C. An agarose solution was heated to boiling and added to the dsRNA dilutions, leading to final concentrations of 5% sucrose and 0.5% agarose. The agarose solution containing the dsRNA was divided over three petri dishes (diameter=3 cm), the final dose being 67 μg of dsRNA per petri dish. Ten to twelve adults were added to each petri dish to have between 30 and 36 adults per treatment. Each petri dish was maintained at approximately 25° C. and 16:8 light:dark photoperiod. Mortality was recorded at different days post-infestation, with the final survival percentage calculated at 12 days with Abbott correction. dsRNA designed to target green fluorescent protein (GFP) was used as a negative control. Results are depicted in Table 1.

Identification of Target Genes from P. striolata

[0252] Bioassays were performed using an RNA-treated leaf disc method. Briefly, synthesized dsRNA molecules were diluted to the appropriate concentration and applied to canola leaf discs (5 mm diameter), coating the top surface with a final dose of 20 ng/mm². Leaf disks were placed in 20 mL plastic cups with ten beetles per cup. Beetles were fed fresh leaf discs, coated with dsRNA, every second day, for a period of two weeks. The cups were maintained at approximately 25° C. and 16:8 light:dark photoperiod. The number of dead adults was recorded every second day (when fresh leaf discs are provided), with the final survival percentage calculated at 14 days with Abbott correction. dsRNA designed to target green fluorescent protein (GFP) was used as a negative control. Results are depicted in Table 1.

Identification of Target Genes from P. armoraciae

[0253] Bioassays are performed using an RNA-treated artificial diet method. Briefly, synthesized dsRNA molecules are diluted to the appropriate concentration in a sucrose solution. The solution containing the dsRNA is divided over three wells of a 96-well plate, the final dose being 1 μg/μl dsRNA in 5% sucrose per well. The plates are then sealed and six pinholes per well are made through the seals. Eight adults per well are added to a 6-well plate which is attached to the reversed sample plate by the use of tape, allowing the insects to feed on the droplets. On day 3 the dsRNA solution is replaced by a 15% sucrose solution to keep the insects until the end of the assay. Each assay is maintained at approximately 25° C. and 16:8 light:dark photoperiod. Mortality is recorded at different days post-infestation, with the final survival percentage calculated at 10 up to 17 days with Abbott correction. dsRNA designed to target green fluorescent protein (GFP) is used as a negative control. dsRNA designed to the specific ubiquitin protein is used as a positive control. Results are depicted in Table 1.

Identification of Target Genes from P. cruciferae

[0254] Bioassays are performed using an RNA-treated artificial diet method. Briefly, synthesized dsRNA molecules are diluted to the appropriate concentration in a sucrose solution. The solution containing the dsRNA is divided over three wells of a 96-well plate, the final dose being 1 μg/μl dsRNA in 5% sucrose per well. The plates are then sealed and six pinholes per well are made through the seals. Eight adults per well are added to a 6-well plate which is attached to the reversed sample plate by the use of tape, allowing the insects to feed on the droplets. On day 3 the dsRNA solution is replaced by a 15% sucrose solution to keep the insects until the end of the assay. Each assay is maintained at approximately 25° C. and 16:8 light:dark photoperiod. Mortality is recorded at different days post-infestation, with the final survival percentage calculated at 10 up to 17 days with Abbott correction. dsRNA designed to target green fluorescent protein (GFP) is used as a negative control. dsRNA designed to the specific ubiquitin protein is used as a positive control. Results are depicted in Table 1.

[0255] For Table 1, the target gene is named. The Target ID is also named for each ortholog from each flea beetle species tested. “Pc” indicates the target ID is from P. chrysocephala, “Pn” indicates the target ID is from P. nemorum, “Ps” indicates the target ID is from P. striolata, “Pa” indicates the target ID is from P. armoraciae, and “Pu” indicates the target ID is from P. cruciferae. The “SEQ ID NO.” indicates the RNA sequence of the sense strand of the dsRNA tested. “Survival %” is the final survival percentage calculated, with Abbott correction, for each insect bioassay.

TABLE 1
Activity of dsRNA molecules against flea beetle species

| | Pa | | | Pu | | |
|---|---|---|---|---|---|---|
| | Target | SEQ ID | Survival | Target | SEQ ID | Survival |
| Target gene | ID | NO. | % | ID | NO. | % |
| GFP | | | 100 | | | 100 |
| Rpn12 | Pa1 | 511 | 0 | Pu1 | 596 | 33.3 |
| RpS13 | Pa2 | 512 | 38.6 | Pu2 | 597 | |
| RpS3A | Pa3 | 513 | | Pu3 | 598 | |
| Prosbeta2 | Pa4 | 514 | | Pu4 | 599 | |
| RpL11 | Pa5 | 515 | | Pu5 | 600 | |
| RpS18 | Pa6 | 516 | | Pu6 | 601 | |
| alphaSnap | Pa7 | 517 | 32.0 | Pu7 | 602 | 23.3 |
| His2B | Pa8 | 518 | 36.8 | Pu8 | 603 | 60.7 |
| Vha13 | Pa9 | 519 | 17.5 | Pu9 | 604 | |
| His2A | Pa10 | 520 | | Pu10 | 605 | |
| RpII215 | Pa11 | 521 | 15.3 | Pu11 | 606 | 0 |
| RpL18A | Pa12 | 522 | | Pu12 | 607 | |
| RpL27 | Pa13 | 523 | | Pu13 | 608 | |
| RpL32 | Pa14 | 524 | | Pu14 | 609 | |
| Rpb4 | Pa15 | 525 | 9.1 | Pu15 | 610 | |
| Cpsf73 | Pa16 | 526 | 57.1 | Pu16 | 611 | |
| Sf3b1 | Pa17 | 527 | 43.9 | Pu17 | 612 | 10.1 |
| | Ps | | | Pc | | |
| | Target | SEQ ID | Survival | Target | SEQ ID | Survival |
| Target gene | ID | NO. | % | ID | NO | % |
| GFP | | | 100 | | | 100 |
| Rpn12 | Ps1 | 562 | 17.8 | Pc1 | 528 | 66.7 |
| RpS13 | Ps2 | 563 | 35.6 | Pc2 | 529 | |
| RpS3A | Ps3 | 564 | 0 | Pc3 | 530 | |
| Prosbeta2 | Ps4 | 565 | 6.7 | Pc4 | 531 | |
| RpL11 | Ps5 | 566 | 0 | Pc5 | 532 | |
| RpS18 | Ps6 | 567 | 8.9 | Pc6 | 533 | |
| alphaSnap | Ps7 | 568 | 8.9 | Pc7 | 534 | 24.3 |
| His2B | Ps8 | 569 | 17.8 | Pc8 | 535 | 33.3 |
| Vha13 | Ps9 | 570 | 17.8 | Pc9 | 536 | 16.7 |
| His2A | Ps10 | 571 | 26.7 | Pc10 | 537 | |
| RpII215 | Ps11 | 572 | | Pc11 | 538 | |
| RpL18A | Ps12 | 573 | 17.8 | Pc12 | 539 | |
| RpL27 | Ps13 | 574 | 0 | Pc13 | 540 | |
| RpL32 | Ps14 | 575 | 0 | Pc14 | 541 | |
| Rpb4 | Ps15 | 576 | 46.2 | Pc15 | 542 | |
| Cpsf73 | Ps16 | 577 | | Pc16 | 543 | |
| Sf3b1 | Ps17 | 578 | | Pc17 | 544 | |

[0256] Table 1a,b shows the insecticidal activity of the selected targets for each of the flea beetle insects analyzed. It has previously been suggested that certain genes of a given insect species can be predicted to confer an RNAi-mediated insecticidal effect based on the essential nature of the gene in insect of a different genus. However, empirical evaluation of the target genes revealed that the insecticidal effect could not be predicted (See Baum et al., 2007, Nature Biotechnology 25: 1322-1326; also U.S. Publication No. 2015/0322456). Additionally, it has been suggested that a gene which has been shown to be a useful target for RNAi-mediated insect control for one insect pest is a useful target for RNAi-mediated insect control of a second insect pest of a different genus and/or family. However, empirical evaluation of the target gene in different insect pests of different families show that a given target with very high insecticidal activity in one insect pest may not produce significant mortality or growth inhibition in a second insect pest (Knorr et al, 2018, Scientific Reports 8: 2061, DOI: 10.1038/s41598-018-20416-y). Therefore, the insecticidal activity of a dsRNA molecule against a target gene of an insect pest can only be determined empirically.

### Example 3: Dose Response Curves of Selected dsRNA Molecules Against Flea Beetle Species

[0257] This example describes testing dsRNA molecules of the invention for biological activity against flea beetle species in further laboratory bioassays. In other words, dsRNAs based on coding sequences from P. chrysocephala were further tested against P. chrysocephala insects, dsRNAs based on coding sequences from P. nemorum were further tested against P. nemorum insects, dsRNAs based on coding sequences from P. striolata were further tested against P. striolata insects, dsRNAs based on coding sequences from P. armoraciae were tested against P. armoraciae insects, and dsRNAs based on coding sequences from P. cruciferae were tested against P. cruciferae insects.

Dose Response Curves of Selected dsRNA Molecules Against P. chrysocephala

[0258] The dsRNA molecules described above are tested for toxicity against P. chrysocephala in laboratory bioassays in a dilution series including a 2-fold and 10-fold dilution to generate dose response curves (DRC). Bioassays are performed using an RNA-treated artificial diet method. Briefly, synthesized dsRNA molecules are diluted to the appropriate concentration in a sucrose solution. Samples containing dsRNA and sucrose are heated up to 60° C. An agarose solution is heated till boiling and added to the dsRNA dilutions, leading to final concentrations of 5% sucrose and 0.5% agarose. The agarose solution containing the dsRNA is divided over three petri dishes (diameter=3 cm), the final dose being 67 μg, 33 μg or 7 μg of dsRNA per petri dish. Ten to twelve adults are added to each petri dish to have between 30 and 36 adults per treatment. Each petri dish is maintained at approximately 25° C. and 16:8 light:dark photoperiod. Mortality is recorded at different days post-infestation, with percent survival (% survival) calculated on day 12 with an Abbott correction. dsRNA designed to target GFP is used as a negative control.

Dose Response Curves of Selected dsRNA Molecules Against P. nemorum

[0259] The dsRNA molecules described above are tested for toxicity against P. nemorum in laboratory bioassays in a dilution series including a 2-fold and 10-fold dilution to generate dose response curves (DRC). Bioassays are performed using an RNA-treated artificial diet method. Briefly, synthesized dsRNA molecules are diluted to the appropriate concentration in a sucrose solution. Samples containing dsRNA and sucrose are heated up to 60° C. An agarose solution is heated till boiling and added to the dsRNA dilutions, leading to final concentrations of 5% sucrose and 0.5% agarose. The agarose solution containing the dsRNA is divided over three petri dishes (diameter=3 cm), the final dose being 67 μg, 33 μg or 7 μg of dsRNA per petri dish. Ten to twelve adults are added to each petri dish to have between 30 and 36 adults per treatment. Each petri dish is maintained at approximately 25° C. and 16:8 light:dark photoperiod. Mortality is recorded at different days post-infestation, with percent survival (% survival) calculated on day 12 with an Abbott correction. dsRNA designed to target GFP is used as a negative control.

Dose Response Curves of Selected dsRNA Molecules Against P. striolata

[0260] The dsRNA molecules described above are tested for toxicity against P. striolata in laboratory bioassays in a dilution series including a 2-fold and 10-fold dilution to generate dose response curves (DRC). Bioassays are performed using an RNA-treated leaf disc method. Briefly, synthesized dsRNA molecules are diluted to the appropriate concentration and applied to canola leaf discs (5 mm diameter), coating the top surface with a final dose of 20, 10 or 2 ng/mm2. Leaf disks are placed in 20 mL plastic cups with ten beetles per cup. Beetles are fed fresh leaf discs, coated with dsRNA, every second day, for a period of two weeks. The cups are maintained at approximately 25° C. and 16:8 light:dark photoperiod. The number of dead adults is recorded every second day (when fresh leaf discs are provided), with the final survival percentage calculated at 14 days. dsRNA designed to target green fluorescent protein (GFP) is used as a negative control.

### Example 4: Testing of Other dsRNA Sub-Fragments of Selected Targets Against Flea Beetle Species

[0261] Testing of Other dsRNA Sub-Fragments of Selected Targets Against P. chrysocephala

[0262] This example describes testing other sub-fragments of dsRNA molecules of the invention for biological activity against P. chrysocephala. These sub-fragments are based on the coding sequence of a selection of positive targets, and are either a shorter length or are based on a different region of the coding sequence compared to the initial dsRNA fragment.

[0263] The dsRNA molecules described below are tested for toxicity against P. chrysocephala in laboratory bioassays. Bioassays are performed using an RNA-treated artificial diet method. Briefly, synthesized dsRNA molecules are diluted to the appropriate concentration in a sucrose solution. Samples containing dsRNA and sucrose are heated up to 60° C. An agarose solution is heated to boiling and added to the dsRNA dilutions, leading to final concentrations of 5% sucrose and 0.5% agarose. The agarose solution containing the dsRNA is divided over three petri dishes (diameter=3 cm), the final dose being 67 μg of dsRNA per petri dish. Ten to twelve adults are added to each petri dish to have between 30 and 36 adults per treatment. Each petri dish is maintained at approximately 25° C. and 16:8 light:dark photoperiod. Mortality is recorded at different days post-infestation, with the final survival percentage calculated at 12 days with Abbott correction. dsRNA designed to target green fluorescent protein (GFP) is used as a negative control.

Testing of Other dsRNA Sub-Fragments of Selected Targets Against P. nemorum

[0264] This example describes testing other sub-fragments of dsRNA molecules of the invention for biological activity against P. nemorum. These sub-fragments are based on the coding sequence of a selection of positive targets, and are either a shorter length or are based on a different region of the coding sequence compared to the initial dsRNA fragment.

[0265] The dsRNA molecules described below are tested for toxicity against P. nemorum in laboratory bioassays. Bioassays are performed using an RNA-treated artificial diet method. Briefly, synthesized dsRNA molecules are diluted to the appropriate concentration in a sucrose solution. Samples containing dsRNA and sucrose are heated up to 60° C. An agarose solution is heated to boiling and added to the dsRNA dilutions, leading to final concentrations of 5% sucrose and 0.5% agarose. The agarose solution containing the dsRNA is divided over three petri dishes (diameter=3 cm), the final dose being 67 μg of dsRNA per petri dish. Ten to twelve adults are added to each petri dish to have between 30 and 36 adults per treatment. Each petri dish is maintained at approximately 25° C. and 16:8 light:dark photoperiod. Mortality is recorded at different days post-infestation, with the final survival percentage calculated at 12 days with Abbott correction. dsRNA designed to target green fluorescent protein (GFP) is used as a negative control.

Testing of Other dsRNA Sub-Fragments of Selected Targets Against P. striolata

[0266] This example describes testing other sub-fragments of dsRNA molecules of the invention for biological activity against P. striolata. These sub-fragments are based on the coding sequence of a selection of positive targets, and are either a shorter length or are based on a different region of the coding sequence compared to the initial dsRNA fragment.

[0267] The dsRNA molecules described below are tested for toxicity against P. striolata in laboratory bioassays. Bioassays are performed using an RNA-treated leaf disc method. Briefly, synthesized dsRNA molecules are diluted to the appropriate concentration and applied to canola leaf discs (5 mm diameter), coating the top surface with a final dose of 20 ng/mm2. Leaf disks are placed in 20 mL plastic cups with ten beetles per cup. Beetles are fed fresh leaf discs, coated with dsRNA, every second day, for a period of two weeks. The cups are maintained at approximately 25° C. and 16:8 light:dark photoperiod. The number of dead adults is recorded every second day (when fresh leaf discs are provided), with the final survival percentage calculated at 14 days with Abbott correction. dsRNA designed to target green fluorescent protein (GFP) is used as a negative control.

### Example 5. Producing Targeted dsRNA Molecules by Bacterial Expression

[0268] This example describes producing dsRNA molecules engineered against identified flea beetle targets using a bacterial expression system.

[0269] A hairpin cassette is engineered for at least one selected flea beetle target (a P. chrysocephala, P. nemorum, P. striolata, P. armoraciae and/or P. crucifera target). The hairpin cassette comprises a T7 promoter operably linked to an antisense sequence of the target, further linked at the 3′end to a nucleic acid sequence which is capable of forming a loop structure, further linked at the 3′end to the corresponding sense sequence of the target, operably linked at the 3′end to a T7 terminator sequence. The hairpin cassette is introduced into bacterial expression vector pGCP295 via BamHI and NotI restriction sites. The vector is then introduced into Escherichia coli strain HT115(DE3)GA01 via electroporation using standard methods, and transformants are selected for using kanamycin selection.

[0270] The bacteria containing the targeted dsRNA expression vector plasmid are grown in defined medium to a specific optical density and induced by addition of IPTG for a specific time period following standard methods and routine optimization. After induction, the bacteria are harvested by centrifugation, and the produced dsRNA molecules are collected.

### Example 6: Activity of dsRNA Molecules in a Spray Application Assay

[0271] This example describes testing of a sub-set of the identified target dsRNAs of the invention for biological activity against flea beetles when applied as a spray. The target dsRNAs may be derived from target genes from P. chrysocephala, P. nemorum, P. striolata, P. armoraciae and/or P. cruciferae. dsRNA molecules are bacterially produced as described above for testing as a spray application on planta. A negative control GFP dsRNA molecule is also produced.

[0272] Three 2-3 week old oil seed rape plants (Brassica napus L.) are sprayed with bacterially produced dsRNA (for example, 200 μg per 3 plants), dissolved in a sucrose solution. 15 insects are put on the plant after spraying, and the infested plant is maintained in a container closed with a mesh. Three days after the initial spraying, the plant is replaced by a second plant sprayed with the same bacterial lysate sucrose solution. Six days after the initial spraying the insects are transferred to an untreated plant. The number of dead adults is recorded every two to three days.

### Example 7: Expression of an Interfering RNA Molecule Comprising Target dsRNA in Canola Plants

[0273] This example describes introducing a construct that expresses an interfering RNA molecule into plant cells.

### Vector Construction

[0274] Expression vectors designed to produce hairpin RNAs (hpRNA) consist of a cassette containing a promoter, a sense strand, an intron functioning as a loop sequence, an antisense strand, and terminator. The hpRNA targets at least 21 nucleotides of an endogeneous gene target as described in Table 1. The hpRNA expression cassette is cloned into a binary vector. The binary vector also contains a second expression cassette between the left and right T-DNA borders which designed to express a selectable marker for selection of transgenic cells, tissues, and/or plants following plant transformation. The binary vector also contains selectable markers for selection of the presence of the binary vector bacteria.

Agrobacterium-Mediated Transformation of Brassica napus

[0275] Each resulting plasmid containing the hairpin cassette was transformed into Agrobacterium tumefaciens using standard molecular biology techniques known to those skilled in the art. The vectors described above were transformed into canola.

[0276] Stably transformed Brassica napus cv. ‘Westar’ events are obtained using an adapted published floral dip protocol (Wang et al. 2003). Adult flowering plants are infiltrated twice under vacuum with an Agrobacterium tumefaciens suspension. The strain used is C58C1RifR harbouring the pGV3101 Ti plasmid and a binary vector containing two plant expression cassettes, one for the insect target derived dsRNA which was inserted as a hairpin and an nptII based plant selectable marker.

[0277] After the two infiltrations, performed a week apart, the plants are allowed to mature and set seed. To identify the transformation events, the seed is soaked for 2 days in 300 mg/I kanamycin sulphate solution and then sown out into soil (Li et al. 2010). One week after sowing, the putative positive seedlings are identified due to their healthy green expanded cotyledons versus the smaller, shrunken bleached non-transformed seedlings.

[0278] The transgenic status of the putative events is checked by plus/minus PCR for the presence of the nptII sequence. Positive events are grown up to flowering at which point racemes are removed for insect bioassay.

### Transgenic Canola Feeding Assay

[0279] For the insect feeding bioassay, racemes are removed from the plant when in bud and immediately the cut end is put through the plastic lid of a 20 ml glass vial containing water. Each raceme is infested with 10-15 wild caught P. chrysocephala, P. nemorum, and/or P. striolata adults, and mortality is scored up till day 14 post infestation. The racemes are changed for fresh at day 7.

### Example 8: Interfering RNA Molecules with a Second Insecticidal Agent Bioassays

[0280] Double stranded RNA molecules are produced against a selected target. Additionally, a second insecticidal agent is prepared. Both the RNA and the second insecticidal agent are tested in combination for toxicity against P. chrysocephala, P. nemorum, and/or P. striolata in laboratory bioassays.

[0281] It should be understood that the examples and embodiments described herein are for illustrative purposes only and that various modifications or changes in light thereof of the description will be suggested to persons skilled in the art and are to be included within the spirit and purview of this application and the scope of the appended claims.

[0282] All publications and patent applications mentioned in this specification are indicative of the level of skill of those skilled in the art that this invention pertains.

[0283] Additional Particular Embodiments:

[0284] The following are particular embodiments of the invention:

1. An interfering ribonucleic acid (RNA) molecule wherein the RNA comprises at least one dsRNA wherein the dsRNA is a region of double-stranded RNA comprising annealed complementary strands, one strand of which comprises a sequence of at least 19 contiguous nucleotides which is at least partially complementary to a target nucleotide sequence within a flea beetle target gene, and (i) is at least 85% identical to at least a 19 contiguous nucleotide fragment of SEQ ID NO: 409-612, or the complement thereof; (ii) comprises at least a 19 contiguous nucleotide fragment of SEQ ID NO: 409-612, or the complement thereof; (iii) comprises at least a 19 contiguous nucleotide fragment of a nucleotide sequence encoding an amino acid sequence encoded by SEQ ID NO: 409-612, or the complement thereof, or (iv) can hybridize under stringent conditions to a polynucleotide comprising the nucleotide sequence of SEQ ID NO: 409-612, or the complements thereof, wherein the interfering RNA molecule has insecticidal activity on an insect pest, wherein the insect pest is a flea beetle of the Alticini tribe.
2. An interfering RNA molecule of claim 1, wherein said insect pest is a flea beetle is a species of the Phyllotreta or Psylliodes genera.
3. An interfering RNA molecule of claim 1 wherein the RNA comprises at least two dsRNAs, wherein each dsRNA comprises a sequence of nucleotides which is at least partially complementary to a target nucleotide sequence within the target gene.
4. An interfering RNA molecule of claim 3 wherein each of the dsRNAs comprise a different sequence of nucleotides which is at least partially complementary to a different target nucleotide sequence within the target gene.
5. The interfering RNA molecule of claim 1, wherein the interfering RNA molecule comprises SEQ ID NO: 409-612, or the complement thereof.
6. An interfering RNA molecule of claim 1, wherein the dsRNA is a region of double-stranded RNA comprising substantially complementary annealed strands.
7. An interfering RNA molecule of claim 1, wherein the dsRNA is a region of double-stranded RNA comprising fully complementary annealed strands.
8. An interfering RNA molecule of any one of claims 1 to 7, wherein the insect pest is a flea beetle selected from the group consisting of Phyllotreta armoraciae (horseradish flea beetle), Phyllotreta cruciferae (canola flea beetle), Phyllotreta pusilla (western black flea beetle), Phyllotreta nemorum (striped turnip flea beetle), Phyllotreta atra (turnip flea beetle), Phyllotreta robusta (garden flea beetle), Phyllotreta striolata (striped flea beetle), Phyllotreta undulata, Psylliodes chrysocephala, and Psylliodes punctulata (hop flea beetle).
9. A nucleic acid construct comprising the interfering RNA molecule of any of claims 1 to 8.
10. A nucleic acid molecule encoding the interfering RNA molecule of any of claims 1 to 8.
11. A nucleic acid construct comprising a nucleotide sequence that encodes the nucleic acid molecule of claim 10.
12. The nucleic acid construct of any of claim 9 or 11 wherein the nucleic acid construct is an expression vector.
13. A recombinant vector comprising a regulatory sequence operably linked to a nucleotide sequence that encodes the interfering RNA molecule of any one of claims 1 to 8.
14. A composition comprising two or more of the interfering RNA molecules of any of claims 1 to 8.
15. A composition of claim 14 wherein the two or more interfering RNA molecules are present on the same nucleic acid construct, on different nucleic acid constructs, or any combination thereof.
16. A composition of any of claim 14 or 15, comprising an interfering RNA molecule which comprises at least one dsRNA wherein the dsRNA is a region of double-stranded RNA comprising annealed complementary strands, one strand of which comprises a sequence of at least 19 contiguous nucleotides which (i) is at least 85% identical to at least a 19 contiguous nucleotide fragment of SEQ ID NO: 409-612, or complement thereof; or (ii) comprises at least a 19 contiguous nucleotide fragment of SEQ ID NO: 409-612, or complement thereof.
17. A composition comprising two or more of the nucleic acid constructs of any of claims 9, 11, or 12, wherein the two or more nucleic acid constructs each comprise a different interfering RNA.
18. A composition comprising two or more of the nucleic acid molecules of claim 10, wherein the two or more nucleic acid molecules each encode a different interfering RNA molecule.
19. An insecticidal composition for inhibiting the expression of a flea beetle target gene, comprising the interfering RNA of any one of claims 1 to 8 and an agriculturally acceptable carrier.
20. An insecticidal composition of claim 19 comprising at least a second insecticidal agent for controlling a flea beetle.
21. An insecticidal composition of claim 20 wherein the second insecticidal agent is a Bacillus thuringiensis insecticidal protein.
22. An insecticidal composition of claim 20 wherein the second insecticidal agent is not a Bacillus thuringiensis insecticidal protein.
23. An insecticidal composition of claim 20 wherein the second insecticidal agent is a patatin, a protease, a protease inhibitor, a urease, an alpha-amylase inhibitor, a pore-forming protein, a lectin, an engineered antibody or antibody fragment, or a chitinase.
24. An insecticidal composition of claim 22 wherein the second insecticidal agent is or is derived from a Bacillus cereus insecticidal protein, a Xenorhabdus spp. insecticidal protein, a Photorhabdus spp. insecticidal protein, a Brevibacillus laterosporous insecticidal protein, a Lysinibacillus sphearicus insecticidal protein, a Chromobacterium spp. insecticidal protein, a Yersinia entomophaga insecticidal protein, a Paenibacillus popiliae insecticidal protein, or a Clostridium spp. insecticidal protein.
25. A transgenic plant, or part thereof, comprising the interfering RNA molecule, the nucleic acid molecule, the nucleic acid construct, and/or the composition of any of the respective preceding claims, wherein the transgenic plant has enhanced resistance to a flea beetle as compared to a control plant.
26. A transgenic plant, or part thereof, of claim 25, wherein the transgenic plant comprises at least a second insecticidal agent for controlling flea beetles.
27. A transgenic plant, or part thereof, of claim 26, wherein the second insecticidal agent is a Bacillus thuringiensis insecticidal protein.
28. A transgenic plant, or part thereof, of claim 26, wherein the second insecticidal agent is not a Bacillus thuringiensis insecticidal protein.
29. A transgenic plant, or part thereof, of claim 26, wherein the second insecticidal agent is a patatin, a protease, a protease inhibitor, a urease, an alpha-amylase inhibitor, a pore-forming protein, a lectin, an engineered antibody or antibody fragment, or a chitinase.
30. The transgenic plant, or part thereof, of claim 28, wherein the second insecticidal agent is or is derived from a Bacillus cereus insecticidal protein, a Xenorhabdus spp. insecticidal protein, a Photorhabdus spp. insecticidal protein, a Brevibacillus laterosporous insecticidal protein, a Lysinibacillus sphearicus insecticidal protein, a Chromobacterium spp. insecticidal protein, a Yersinia entomophaga insecticidal protein, a Paenibacillus popiliae insecticidal protein, or a Clostridium spp. insecticidal protein.
31. A transgenic plant, or part thereof, of any one of claims 25 to 30, wherein the transgenic plant, or part thereof, is a canola plant or part thereof.
32. Transgenic seed of a transgenic plant of any one of claims 25 to 31.
33. A biological sample from the transgenic plant, or part thereof, of any one of claims 25 to 31.
34. A commodity product derived from the transgenic plant, or part thereof, of any one of claims 25 to 31.
35. A commodity product of claim 34, wherein the commodity product is selected from the group consisting of whole or processed seeds, kernels, hulls, meals, grits, flours, sugars, sugars, starches, protein concentrates, protein isolates, waxes, oils, extracts, juices, concentrates, liquids, syrups, feed, silage, fiber, paper or other food or product produced from plants.
36. A method of controlling a flea beetle comprising contacting the flea beetle with a nucleic acid molecule that is or is capable of producing an interfering RNA molecule of claims 1-8 for inhibiting expression of a target gene in the flea beetle thereby controlling the flea beetle.
37. The method of claim 36, wherein the target gene comprises a coding sequence which:

[0285] a) is at least 85% identical to at least a 19 nucleotide contiguous fragment of SEQ ID NO: 1-102, or a complement thereof;

[0286] b) comprises at least a 19 nucleotide contiguous fragment of SEQ ID NO: 1-102, or a complement thereof; or

[0287] c) comprises at least a 19 nucleotide contiguous fragment of a nucleotide sequence encoding an amino acid sequence encoded by SEQ ID NO: 1-102, or a complement thereof.

38. The method of claim 36 wherein the interfering RNA molecule comprises at least one dsRNA, wherein the dsRNA is a region of double-stranded RNA comprising annealed complementary strands, one strand of which comprises a sequence of at least 19 contiguous nucleotides which (i) is at least 85% identical to at least a 19 contiguous nucleotide fragment of SEQ ID NO: 409-612, or the complement thereof; or (ii) comprises at least a 19 contiguous nucleotide fragment of SEQ ID NO: 409-612, or the complement thereof; or (iii) comprises at least a 19 contiguous nucleotide fragment of a nucleotide sequence encoding an amino acid sequence encoded by SEQ ID NO: 409-612, or the complement thereof.
39. The method of any one of claims 36 to 38, wherein the flea beetle is selected from the group consisting of Phyllotreta armoraciae (horseradish flea beetle), Phyllotreta cruciferae (canola flea beetle), Phyllotreta pusilla (western black flea beetle), Phyllotreta nemorum (striped turnip flea beetle), Phyllotreta atra (turnip flea beetle), Phyllotreta robusta (garden flea beetle), Phyllotreta striolata (striped flea beetle), Phyllotreta undulata, Psylliodes chrysocephala, and Psylliodes punctulata (hop flea beetle).
40. The method of claim 39, wherein contacting comprises:

[0288] a) planting a transgenic seed capable of producing a transgenic plant that expresses the nucleic acid molecule, wherein the flea beetle feeds on the transgenic plant, or part thereof; or

[0289] b) applying a composition comprising the nucleic acid molecule to a seed or plant, or part thereof, wherein the flea beetle feeds on the seed, the plant, or a part thereof.

41. The method of claim 39, wherein the transgenic seed and transgenic plant is a canola seed and a canola plant.
42. The method of claim 39, wherein the seed or plant is a canola seed or canola plant.
43. A method of controlling a flea beetle comprising contacting the flea beetle with a nucleic acid molecule that is or is capable of producing the interfering RNA molecule of claims 1-8 for inhibiting expression of a target gene in the flea beetle, and contacting the flea beetle with at least a second insecticidal agent for controlling the flea beetle.
44. A method of controlling a flea beetle comprising contacting the flea beetle with a nucleic acid molecule that is or is capable of producing the interfering RNA molecule of claims 1-8 for inhibiting expression of a target gene in the flea beetle, and contacting the flea beetle with at least a second insecticidal agent for controlling the flea beetle, thereby controlling the flea beetle, wherein said second insecticidal agent comprises a B. thuringiensis insecticidal protein.
45. A method of controlling a flea beetle comprising contacting the flea beetle with a nucleic acid molecule that is or is capable of producing the interfering RNA molecule of claims 1-8 for inhibiting expression of a target gene in the flea beetle, and contacting the flea beetle with at least a second insecticidal agent for controlling the flea beetle, thereby controlling the flea beetle, wherein said second insecticidal agent does not comprise a B. thuringiensis insecticidal protein.
46. The method of claim 43, wherein the second insecticidal agent comprises a patatin, a protease, a protease inhibitor, a urease, an alpha-amylase inhibitor, a pore-forming protein, a lectin, an engineered antibody or antibody fragment, or a chitinase.
47. The method of claim 45, wherein the second insecticidal agent comprises a Bacillus cereus insecticidal protein, a Xenorhabdus spp. insecticidal protein, a Photorhabdus spp. insecticidal protein, a Brevibacillus laterosporous insecticidal protein, a Lysinibacillus sphearicus insecticidal protein, a Chromobacterium spp. insecticidal protein, a Yersinia entomophaga insecticidal protein, a Paenibacillus popiliae insecticidal protein, or a Clostridium spp. insecticidal protein.
48. A method of reducing an adult flea beetle population on a transgenic plant expressing a Cry protein, a hybrid Cry protein or modified Cry protein comprising expressing in the transgenic plant a nucleic acid molecule that is or is capable of producing an interfering RNA molecule of claim 1, which inhibits expression of a target gene in an adult flea beetle thereby reducing the adult flea beetle population.
49. A method of reducing resistance development in a flea beetle population to an interfering RNA molecule of claim 1, the method comprising expressing in a transgenic plant fed upon by the flea beetle population an interfering RNA molecule of claim 1 which inhibits expression of a target gene in a larval and adult flea beetle, thereby reducing resistance development in the flea beetle population compared to a flea beetle population exposed to an interfering RNA molecule capable of inhibiting expression of a target gene in a larval or adult flea beetle.
50. A method of reducing the level of a target RNA transcribed from a target gene in a flea beetle comprising contacting the flea beetle with a composition comprising the interfering RNA molecule of any one of claims 1 to 8, wherein the interfering RNA molecule reduces the level of the target RNA in a cell of the flea beetle.
51. The method of claim 50, wherein production of the protein encoded by the target RNA is reduced.
52. The method of claim 51, wherein the protein comprises an amino acid sequence encoded by a nucleic acid sequence with at least 85% identity to SEQ ID NO: 1-102 or the complement thereof.
53. The method of claim 50, wherein the interfering RNA is from a transgenic organism expressing the interfering RNA.
54. The method of claim 53, wherein the transgenic organism is a transgenic plant, a transgenic microorganism, a transgenic bacterium, or a transgenic endophyte.
55. The method of claim 50, wherein the interfering RNA is lethal to a flea beetle.
56. The method of claim 55, wherein the flea beetle is selected from the group consisting of Phyllotreta armoraciae (horseradish flea beetle), Phyllotreta cruciferae (canola flea beetle), Phyllotreta pusilla (western black flea beetle), Phyllotreta nemorum (striped turnip flea beetle), Phyllotreta atra (turnip flea beetle), Phyllotreta robusta (garden flea beetle), Phyllotreta striolata (striped flea beetle), Phyllotreta undulata, Psylliodes chrysocephala, and Psylliodes punctulata (hop flea beetle).
57. A method of conferring flea beetle tolerance to a plant, or part thereof, comprising introducing into the plant, or part thereof, the interfering RNA molecule, the nucleic acid molecule, the nucleic acid construct, and/or the composition of any of the respective preceding claims, thereby conferring tolerance of the plant or part thereof to the flea beetle.
58. A method of reducing damage to a plant fed upon by a flea beetle, comprising introducing into cells of the plant the interfering RNA molecule, the nucleic acid molecule, the nucleic acid construct, and/or the composition of any of the respective preceding claims, thereby reducing damage to the plant.
59. A method of producing a transgenic plant cell having toxicity to a flea beetle, comprising introducing into a plant cell the interfering RNA, the nucleic acid molecule, the nucleic acid construct, and/or the composition of any of the respective preceding claims, thereby producing the transgenic plant cell having toxicity to the flea beetle compared to a control plant cell.
60. A plurality of transgenic plant cells produced by the method of claim 59.
61. A plurality of transgenic plant cells of claim 60, wherein the plant cells are grown under conditions which include natural sunlight.
62. A method of producing a transgenic plant having enhanced tolerance to flea beetle feeding damage, comprising introducing into a plant the interfering RNA molecule, the nucleic acid molecule, or the nucleic acid construct of any of the respective preceding claims, thereby producing a transgenic plant having enhanced tolerance to flea beetle feeding damage compared to a control plant.
63. The method of claim 62, wherein the introducing step is performed by transforming a plant cell and producing the transgenic plant from the transformed plant cell.
64. The method of claim 62, wherein the introducing step is performed by breeding two plants together.
65. A method of enhancing control of a flea beetle population comprising providing the transgenic plant or plant part of claim 25 and applying to the plant or plant part a chemical pesticide. 66. The method of claim 65, wherein the chemical pesticide is a carbamate, a pyrethroid, an organophosphate, a friprole, a neonicotinoid, an organochloride, a nereistoxin, or a combination thereof. 67. The method of claim 65, wherein the chemical pesticide comprises an active ingredient selected from the group consisting of carbofuran, carbaryl, methomyl, bifenthrin, tefluthrin, permethrin, cyfluthrin, lambda-cyhalothrin, cypermethrin, deltamethrin, chlorpyrifos, chlorethoxyfos, dimethoate, ethoprophos, malathion, methyl-parathion, phorate, terbufos, tebupirimiphos, fipronil, acetamiprid, imidacloprid, thiacloprid, thiamethoxam, endosulfan, bensultap, and a combination thereof.
68. The method of claim 67, wherein the active ingredient is delivered in a product selected from the group consisting of Furadan®, Lanate®, Sevin®, Talstar®, Force®, Ammo®, Cymbush®, Delta Gold®, Karate®, Ambush®, Pounce®, Brigade®, Capture®, ProShield®, Warrior®, Dursban®, Fortress®, Mocap®, Thimet®, AAstar®, Rampart®, Counter®, Cygon®, Dicap®, Regent®, Cruiser®, Gaucho®, Prescribe®, Poncho®, Aztec®, and a combination thereof.
69. A method of providing a canola grower with a means of controlling a flea beetle pest population in a canola crop comprising (a) selling or providing to the grower transgenic canola seed that comprises an interfering RNA molecule, a nucleic acid molecule, a nucleic acid construct, and/or a composition of the invention; and (b) advertising to the grower that the transgenic canola seed produce transgenic canola plants that control a flea beetle pest population.
70. A method of identifying an orthologous target gene for using as a RNAi strategy for the control of a plant pest, said method comprising the steps of:
[0290] a) producing a primer pair that will amplify a target selected from the group comprising or consisting of SEQ ID NO: 1-102, or a complement thereof,
[0291] b) amplifying an orthologous target gene from a nucleic acid sample of the plant pest using the primer pair of step a),
[0292] c) identifying the sequence of the orthologous target gene amplified in step b),
[0293] d) producing an interfering RNA molecule, wherein the RNA comprises at least one dsRNA, wherein the dsRNA is a region of double-stranded RNA comprising annealed complementary strands, one strand of which comprises a sequence of at least 19 contiguous nucleotides which is at least partially complementary to the orthologous target nucleotide sequence within the target gene, and
[0294] e) determining if the interfering RNA molecule of step d) has insecticidal activity on the plant pest;
   wherein if the interfering RNA has insecticidal activity on the plant pest target gene, an orthologous target gene for using in the control of a plant pest has been identified.

The application's sequence listing, which the Patent Office published only in electronic form, follows.

SEQUENCE LISTING (714 sequences)

SEQ ID NO: 1 - DNA, 804 bp, Phyllotreta armoraciae
atgtccaaagtaaacgaagttgctgatttatataaacaattgaaatcagaatggaatacaaaaaacccaaacttaagtaaatgcgagaaactcctgtctcaactgaagctcgaattgaccaatttgatgtttctgccaacttcaacggcaacagctacaaagcaggaattacttttagctcgcgatgtcttagaaattggtgtacaatggagcgttgcagccaatgacataaccgcattcgaaagatatatggctcaattgaaatgctactattttgattacaacaaccagcttcctgagtctgcgtttaaatatcaattactaggattgaatcttctgtttttattgtcgcttaacagagtggcagaatttcacacagagttagaacttttaccagctgatcacatacagaacgatgtgtacataaggcatcctttatcaattgagcaatacctaatggaaggaagttacaataagatattccttgcgaaaggtaatgttcctgcagcaagctacaccttttttatggacatactgcttgatacgattcgagttgaaattgcggattgtttatcagtagcctatgaaaaaatatctgtaaaagattttacaagaatgctctatttgccgaatgaagaaacagctaagaattttgccaaaaaggcttttcaacacaaggcttggaaattggaccatgactacttctactttattcccgaacagaaaactcatgaacctattccttcgaaagaattggcccagcaagcaattgaatacgcaaaggaacttgaaatgattgtttaa

SEQ ID NO: 2 - DNA, 456 bp, Phyllotreta armoraciae
atgggtcggatgcacgcgcccggtaaaggtatcgcccagtcggccctaccctacagaagaagcgtccctacgtggctgaaagtaacccccgaagaagtgaaagagcacatcttcaaattgggcaagaagggcctcacgccgtcccaaatcggcgtcatcctgagggactcctacggagtggcccaggtaaggttcgtctccggcaacaagatcctccgcatcatgaaggccatgggactggcgcccgacctacccgaggacttgtactacctcatcaagaaagccgtggccattcgcaagcacttggagaggaacaggaaggacaaggacagcaagttccgtttgattttggtcgagtctcgtatccacaggctcgccaggtactacaagaccaaatcagtcctagcccctaactggaaatacgaatcgagcacggcttcggctctggtcgcttaa

SEQ ID NO: 3 - DNA, 772 bp, Phyllotreta armoraciae
acgcaaaaaaggtgttaaaaagaaggtgatagatcctttcacgaggaaggattggtacgatgtcaaggccccatcgatgttcaccacgcgccaagttggcaagaccttggtcaaccgtacccaaggtactagaatcgcatctgaaggcctgaaattcagagtcttcgaagtttcattagccgacttacagaacgataatgatgccgaaaggtctttcaggaagttccgtttgattgctgaagatgttcaaggtagaaacgtattaaccaatttccatggtatggacttgaccacggataagttgagatcgatggtgaagaaatggcagactcttatcgaagcttctgctgatgtgaaaacttccgatgggtttttgcttagggtattttgtattggatttaccaacaaagatcagcattcccaaaggaaaacgtgctatgcccagcatacacaagttagagctattcgcaagaagatggtggaaatcatcacccgtgacatccagggttccgacatcaaagaagtagtcaacaaactgttgcccgacagcatagctaaggatatcgagaaggcctgccaaggtatttacccacttcacgatgtctacattcgtaaggtgaaggtactcaagaagccgcgtttcgacctttccaaattgttggaattgcacggtgacggtggcaaaggaggcgccggtgactccactggcgaaggcggttctaaagtagataggccagagggatacgaaccacccgtacaagagtcggtataa

SEQ ID NO: 4 - DNA, 831 bp, Phyllotreta armoraciae
atgagctccgttttgtgtccggaaataccagagccaggtttttcattcgaaaactgcaaaagaaatgccttactggaaagcaagggattttccacccccaaggcgataaagacaggtactacaatcgtagggattgtctacaaagatggtgtgatacttggggctgatactcgagctacagaagatactacggtggccgataaaaactgcgagaaaatccactttttggcaccaaatatgtattgttgtggtgcaggaactgccgcagacactgaaatgaccactcaaatggtagcagcgcaactggaattgcataagctctacacaaacagagaagcccgcgtagcaacagcaaatcagctcctgaagcaatacttattcagttaccaaggttacattggagctgctttgattcttggaggtgtagacatcgaagggccccatctgcatatgatttatcctcacggttccagtgtggatttgccttatgctaccatgggttccggttcattagctgctatatcagtgtttgagttaggctggaagcctgagatgggagaagaagagggcattcagctcgtaagaaacgctatagctgctggtatctttaacgatttaggatctggttctaacgttgatgtttgtatcatacgaaaaggagtagtagattacagaaggacctacgatgaagccaataagaaaggagtcagacaaggatcttacaaatttccaagaggtgctacagctgttttgtctactaaagttgttgatgtagaggaagtttctgtcattcctatagaagctgaaagaatggatgttgccgctttttaa

SEQ ID NO: 5 - DNA, 576 bp, Phyllotreta armoraciae
atggcgcccgtagcgaagcctaaggaaactaaagacaaaagagatgtcaaggataaaaccaaaaatcatatgcgagaattgcatatccgcaaattatgccttaacatttgtgtaggagaatctggtgacagacttactcgtgctgctaaggtattagaacaactgactggtcaacagccagttttctccaaagccagatacaccgtcaggtcttttggaattcgtagaaacgaaaaaattgctgtacactgcacagtaagaggcgcgaaggccgaggaaatattagaaaggggcttaaaagtcagagaatacgaattgaggagggataacttctctatctctggtaacttcggttttggtatccaagaacacattgatcttggaatcaagtacgaccctagcataggtatttacggtcttgatttctacgttgtgttgggtcgccccggtttcaacgtagcccaccgaagagcgaagaagggaaaagttggtttctctcataggttaaccaaggaagacgctatgaagtggttccaacagaaatacgacggaataattttagcgagtaaaaaatag

SEQ ID NO: 6 - DNA, 462 bp, Phyllotreta armoraciae
atgtctttggtaattccggagaaattccaacacattcttcgtatcctcggtacgaatatcgatggaaaaagaaaagtgcaattcgccctcactgccattaaaggtgttggtagacgttattccaatattgtcttgaaaaaggcagatgtgaatttggacaagagggccggagaatgttccgacgaagaagttgaaaaaatcataactattatgtctaatcctcgtcaatataaaattcctgactggtttttgaacagacagaaggacattattgatggtaaatacagtcagctgacttcttcaagtcttgactcgaagttgcgtgaggatttggaaaggatgaagaagattcgtgcccacagaggtatgagacactactggggtcttcgtgtgagaggtcaacacaccaagactactggacgtcgtggacgtaccgtcggtgtgtccaagaagaagattcgt

SEQ ID NO: 7 - DNA, 870 bp, Phyllotreta armoraciae
tccaatgcacaaaaggctcagcaattaatagctgaagctgagaagaaagtgtcctcaaggggatttttcggatctcttttcggagggtccagtcgcattgaagatgcagtggaatgttaccaaagggctgcaaatttgtttaaaatggcgaaaaattgggatgctgctggaaaggctttttgtgaagcagcaaatttgcattcgagaagtggggctcgtcatgatgctgctactaattttgtagatgcagccaactgttataaaaaagctgacatcagtgaggctgttaattgcttgttgaaagctatagaaatctatacagacatgggaaaatttacgatggcagccaagtaccatcaaaacattgccgaaatgtacgagactgatcccgttgacttagaacgagccgttcagcactatgaacaggctgcggactatttccgaggagaagagagcaattcatccgcaaacaaatgtcttctaaaagttgcccagtacgcagcacagctcgaaaactatgaaaaagcaatacaaatctaccaagaagtagctttttcagctctagagagctctctgttaaaatacagtgctaaggagtacctgtttagggctgctctctgccatttatgtgtggatattctcaatgcccagcatgctgtagaaagttatattcaaaggtatccagcatttcaagattcccgagaatataaattgttgaaaacgttgatggaacacattgaagagcagaatgttgatggatatacagatgctgtcaatgattatgattctatttctcgtttagatccttggtatacaacaatcttgctgcgtatcaaaaagcaacttaatgagagtcccgatttacgttaa

SEQ ID NO: 8 - DNA, 372 bp, Phyllotreta armoraciae
atgccaccgaaaactagtggaaaggcagcaaaaaaggctggaaaagctcaaaagaacatttctaaagccgataaaaagaagaaaaggaggaggaaggaaagttacgcaatctacatttacaaagttttaaagcaagtacatcccgataccggtatttccagtaaggcgatgagtattatgaacagtttcgtgaatgacatcttcgaaagaattgccgctgaagcttctcgtctggctcattataacaaacgttctactattactagtagagaaatccaaactgctgtgcgtctgctgcttcccggtgaacttgccaagcacgccgttagtgaaggaactaaggctgttaccaagtacaccagttcgaaataa

SEQ ID NO: 9 - DNA, 354 bp, Phyllotreta armoraciae
atggctagtcatcaaagccagggtgttcaacaattgctggctgcagaaaagcgagctgctgataaagttacagaggctagaaaacgcaaagccagaaggctaaagcaggccaaggaagaagcgcaggatgaaatcgagaagtaccgtaaagaaagggagcgtcaattccgcgaattcgaagccaagcacatgggctctaaagaggatgtagcttcgaagatcgaccaggacaccaagaggagaatcgaggacatgaacaaggctatccaaagtcagaaagaacccgtgatccaaaacatcttggaattggtgtacgatatcaagccggaaatccacaagaattaccgtaattaa

SEQ ID NO: 10 - DNA, 375 bp, Phyllotreta armoraciae
atgtctggtcgcggtaaaggtggtaaagtaaagggaaaggcaaagtctcgttccaatcgtgccggattacaatttcccgtaggtcgtattcacagattattaaggaaaggaaattacgccgaaagagttggtgccggtgctccggtatacttagctgctgtaatggaatatttagccgctgaagtattggaattggcaggtaatgcagctcgtgataacaagaaaacaagaataattccaagacatttgcaattggcaattagaaacgacgaggaattgaataaattactttctggtgttacaattgctcagggaggtgtcctaccgaacattcaagcagtacttctacccaagaagaccgaaaagaaggcttaa

SEQ ID NO: 11 - DNA, 5694 bp, Phyllotreta armoraciae
atggctgcaacagatagtaaagctccgcttagaactgttaaaagagtacagtttggaatacttagtcccgatgaaattcgtcggatgtcagttacagaagggggcatccgctttccagagaccatggaagcgggtcgccccaaaatttgcggtctcatggatccaagacagggcgtcatcgacagaagctcccgatgccagacctgtgccggtaacatgaccgaatgtccaggccacttcggccacgtagatttagccaaaccggtatttcacattggattcataacgaaaaccataaaaatcctcagatgtgtgtgctttttctgcagcaaattgctggtcagccctaacaatcctaaaatcaaagaaattgtaatgaagacaaagggtcaaccgagaaagcgactcacgttcgtgtatgatttgtgcaaaggtaaaaatatttgcgaaggtggagacgaaatggatgtcggtaaagagggcgatgaaagtaaaaaggccgggcacggaggatgcggtagatatcagccgaatatcaggagaataggtctggatttaacggccgaatggaaacacgtcaacgaagatacgcaagagaagaaaatcgctctatcggccgaaagagtttgggagatactgaaacacatcaccgacgaggaatgcttcattctcggtatggatcccaaattcgccagacccgactggatgattgttacagtattgcctgtgcctcctttgtccgtacgtcctgccgttgttatgtatggatcggctagaaatcaagacgatttgactcacaaattagcggatatcattaaatctaacaatgagctgcagaagaacgaagctgctggtgctgctgcccacattattactgagaatattaaaatgttacaattccatgtagccacgttggttgataacgacatgcccggtatgcctagggctatgcaaaaatcgggaaaacccctaaaagccattaaagctcgcttgaagggcaaagaagggagaattagagggaatcttatgggtaaacgtgtcgatttctcggctagaacggtcattactcctgatccgaatttgcgaatcgatcaagtcggcattcctagaagcatcgcacaaaacatgactttcccggaaatcgttacgcctttcaattttgacaaaatgctagagttggttcagcggggcaattctcaatatccaggagccaaatatattattagagataatggagaaagaatagatttaagatttcatccgaaaccttcagatttacatctgcaatggggatataaagtcgaaaggcacatcagagacggcgatttggtgatattcaaccgacaacctactctccacaaaatgagtatgatgggccacagagtcaaagttttaccttggtcgacgtttcgaatgaatttatcatgtacatctccttacaacgccgatttcgatggcgacgaaatgaatttgcatgtaccacaaagtatggaaactagagctgaagtggaaaatatccatatcacgcccagacagattatcacaccgcaagcgaacaaacccgtcatgggaattgtacaggacacgttaacagctgttagaaaaatgaccaaacgagacgttttcatcgagaaggaacaaatgatgaatttgctaatgtttttacctatttgggatggtaaaatgcctcgtccagctattttaaaacccaaacctctatggaccggtaaacaattattttctctcattattcctggaaacgttaatatgatcagaacgcactccactcaccctgatgaagaagacgacggtccctataagtggatatctccaggagatacgaaagtaatggtagaacacggcgaattagtaatgggaatactgtgtaagaaaactcttggtacatcggcaggttcactacttcacatttgtattttggagttgggtcacgaggtttgcggaagattttacggtaacatccaaacagtcatcaacaattggttgctacttgaaggtcatagtatcggtatcggtgacgcaattgccgatcctcagacgtacactgaaattcgaagagccatcaaaaaagccaaagaagatgtaatagaggtcatacaaaaagctcacaacatggaactggaacctactcccggtaatacgttgcgtcaaacattcgagaaccaagtaaacagaatattgaacgatgctcgtgacaaaactggaggttctgcaaaaaaatctttaaccgactacaacaatttaaaggccatggtcgtgtcgggttctaaaggttccaacatcaatatttcacaggttatcgcttgtgtaggtcaacagaacgtcgaaggtaaacgtatcccgttcggcttcagaaaacgcacattgccgcacttcatcaaagacgattacggtccggagtcgagaggtttcgtggaaaattcctatctcgccggtctgactccctccgagttctatttccacgccatgggagggcgtgaaggtctcatcgataccgccgtaaaaactgctgaaactggatacattcaacgtcgtttgataaaagccatggaaagcgttatggtgcattacgatggtaccgtaagaaactcggtaggtcaattgatccagctgaggtatggcgaagacggcctttgcggcgaaatggtcgagtttcaaactttgtccacggtgaagctgagcaacaaagcgtttgaaaggaagttcagattcgatcctagcaacgaacgttaccttagaagagtttttaacgaagaggtaatcaagcaattaatgggatccggagaggttatttctgagctcgagagggaatgggaccaacttcaaaaggaccgggaagctcttcgacagattttccccagcggtgaatccaaagtagtgctgccttgcaatttgcaaagaatgatttggaacgtacaaaaaatattccacattaacaaaagggcgcccaccgatttatcgccgcttagggtaatacaaggcgtgagggaattgttgaaaaaatgcatcattgtagcgggagaggatcgtttgtcgaagcaggccaacgaaaacgcgacgcttctattccagtgtctcgtacgctccacgttgtgtacaaaatgcgtttcggaggagttcagacttagcacggaggcgttcgaatggttgattggagaaattgagacgcgtttccagcaagctcaagtgaatcctggcgaaatggtgggcgcccttgccgcccaatctttgggcgaacccgccactcaaatgacattgaacactttccactttgccggtgtatcatcaaaaaatgtaactctcggtgtgccgagattgaaggaaattattaacatatcgaagaaaccgaaggctccttctttaactgtgtttttaacgggagccgctgcgagagacgccgaaaaagccaagaacgttttatgtcggcttgaacacaccactttacgtaaagttactgcgaacactgccatttactacgatcccgatccacagaatacagtcataccggaagatcaggaattcgtgaacgtttattacgaaatgcccgatttcgatccaactcgcatttctccgtggctgctacgtatcgaattggacaggaaaagaatgaccgataaaaaactcaccatggagcaaatcgccgaaaaaattaacgccggtttcggagacgatctcaattgcattttcaacgatgacaacgcggagaaattggtactgcgcattcgtattatgaacagcgacgacgaaaaattcggagatggagccgacgaagatgtggacaaaatggacgatgacatgtttctcagatgtatcgaggctaacatgctgagcgacatgacgctccagggtatcgaagccatttcgaaagtttacatgcatttaccacaaaccgactcgaagaaacgtatagtaatcaccgatacaggcgaattcaaggctatcgctgaatggttgctcgaaacagacggtacaagtatgatgaaagtactttccgaaagagacgtagaccccgtcagaacgttttcgaacgatatttgcgaaatattctcggtgttgggaatagaagccgttcgaaaatcagttgaaaaagaaatgaacgccgtacttcaattttacggtctgtacgtaaactacagacatctcgccctgctttgtgatgttatgacagccaaaggacatttaatggccataactcgtcacggtataaacagacaagatacgggagcgctgatgagatgttcgttcgaagaaaccgtcgacgtattgatggacgcttccagtcacgccgaagttgatccgatgagaggcgtatcggaaaacattattctcggccaattgcctaggatgggaaccggctgtttcgacttgttattagacgctgataaatgtaaaatgggcatacctatacctcaagctcatacctcggatcttatgacgtctggtatgttctttggctccgcggcaacgccgagcagcatgagccccggcggtgctatgactccttgggctcaggcgaatacaccttatgtaggcagcgagtggtcaccacaaaatatgatgggtagtggtatgactccaggaggagcagcgttttctccttccgcggcatcagatgcttctggaatgtcgcctgcttacggagcttggtctccgacgcctcaatctccggccatgtctccttatatggcgtctcctcatggccaatcgccttcttacagcccttcgagtccggcatttatacccacctcgccgtctatgacgcccacatctcccggatattctccgagttctccgggttattcgcctacaagtcctaattacagtcctacgagtcccagttactctccaacatctccgagttattcaccgacgtctcccagctacagccctacatctccgagttattcgcctacatctccgagttacagtcctacatctcctagttactcgccgacgtctcctagctacagtcctacgtctccgagttattcgcctacttctccgagctacagtccaacttctccgagttactcgcctacttctccgagctacagtcctacgtctccgaattattcacctacatctccgaattacagtcccacatcgccgagctattcgtcgacgtcccctagttattcgccgacttctccgagctacagcccgagctcgcctagctactcaccgtcgtctcctagatacactccggcttcgcctaattattctccgacatctcccagttactcgccgtcatcgccgcaatactcttcggcctcgccgagttactcgccttcatcgccgaaatattcgcccacgtcgccgagttattccccgacgtctccgtcgttctcgggcggcagtccgcagtattcgccgacatcgccgagttactcgccgacgtcgccgagttactcgccgtcgagcccgcaacacacgccggccggcagctcgcggtactcgccgagttcgccgaattattcgccgagctcgccgagctactcgccgacatcgccgcagtattcgccgcgcagcaccaaatattcgccgacgtcgcccacgtacactccgaccagcccgagttactcgccggcgtcgcccgcgtactcgccccagccgcccaggtattcgccttcgtcgcccagctattcgcccaccagtcctgggcaggacaacgattaa

SEQ ID NO: 12 - DNA, 531 bp, Phyllotreta armoraciae
atgaaagctaaaggagagttgaaagaatatgaagttatcgggcgcaaattgcccaccgataaagagaaaagccccccattgtataaaatgaggatattctctcccgacccgatcgtggctaaatcgcgattctggtattttctgagacaacttaggaaattcaagaagaccaccggagaaatcgtttcggtcaagccggtaccagaaaaaacccctaccaagatcaagaactttggtatttggctgaggtacgattcccgttccggtacacataacatgtacagggaatacagggaccttagcgtttctggagccgtaacggcttgttatagagatatgggagctcgtcatcgggctagagcacatgctattcagattattaaagtggaacaagttaagtcgagcgacaccaggaggccacaagtcaaacaattccacgattcaaagattcggttcccgttgcccaaacgtatccaacataagtctatgaaccgcttctctgtccgcaaacccagaacttacttcttgtaa

SEQ ID NO: 13 - DNA, 408 bp, Phyllotreta armoraciae
atgggtaaaataatgaaatctggtaaagtcgtattggtcctcggcggccgatacgcgggaaagaaagccgtcgtcattaaaacatgcgatgatggcacgtctgacaaacaatacggacatgctttagtcgctggtattgacaggtatcccaggaaaatccacaagcgtatgggtaaaggaaaaatgcacaaaaggtccaaaatcaagccttttatcagaattttaaactacaatcacttgatgcctaccaggtattcggtagatttagcttccgatttaaaagtgactcctaaagacctgaaagatccgatgaagaggaagaaggcgcgtttccagacccgcgtgaaatttgaagaaaggtacaagcagggcaagaacaagtggttcttccagaaattgcggttctag

SEQ ID NO: 14 - DNA, 405 bp, Phyllotreta armoraciae
atggctataagaccagtttaccgacccaaaatcgtcaagaagaggacgaagaagttcataaggcatcagtccgacaggtactcgaagctaaagcgcaactggcgtaaacccaagggtattgacaacaggttaagaaggagatccaagggccaatatttaatgccaaatattggttatggatcagcatctaaaactaggcacatgctacctacaggttttagaaaagtgttggtacacaacgttaaggaactagaggttctcctcctgcaaaatcgtaaatactgtgctgaaatcgcccatggtgtttcattgaaaaagcgcaaagatatcgttgaacgtgctcaacaattgagcattcgagtcaccaatggacacgctagattacgtagccaagagaatgagtaa

SEQ ID NO: 15 - DNA, 420 bp, Phyllotreta armoraciae
atggcgaacacgaacaccgatttaatcgaagaagacgccgccgacttgcagttccccaaagaattcgaaaacgctgaaactctgcttatatctgaagtgcacatgctgttggagcaccgtaaagagcaaaacgaatctctggaggacgaacaagaattttcggatgtgttcatgaaaactctgacttacacggacagatttagaaaattcaagaacaaagaaaccatatcggccgtgagaaatttattgatgcagacgaaaaaactccacaagttcgagctggcagccatagcgaatttgtgcccggagaccaccgaagaggcgaagtctctgataccttcgctggagggccgtttggaagacgaggagctccagtcgattttggacgatattcaaacgaaaaggagcatacagtactaa

SEQ ID NO: 16 - DNA, 1722 bp, Phyllotreta armoraciae
atgtcttataaaagaaaagcggagtcgcaaattcccgctgaagagagcgatcaactgataataagaccactgggagccggccaagaagtgggaagatcttgcattatgattgaatttaaaggaaagaaaatcatgttggattgcggcatacatcccgggctatccggaatggacgctttaccgttcgttgacttaattgaagccgatgaaattgatatactccttatatctcattttcatctcgatcacagtggagctttgccttggtttctgctaaaaaccagcttcaaaggccgttgtttcatgactcacgcaacaaaagccatctacaggtggctgttgtccgattacatcaaagtcagtaatattgccacggaacaaatgttatacacggaggccgatttagaagccagtatggataaaatagaaacgataaatttccacgaagaaaaagacgtattgggcgttaaattttgggcttacaatgccggacacgtactgggagctgccatgttcatgatcgaaatagccggtgttaaaatattgtatacaggagatttttctcgacaagaagacaggcatttgatggctgcagaaatacccacgatacatccagacgtattaataacggaatctacttatggtacacatattcatgagaaaagggaagatcgcgaaactcgttttacaacattagtgcacgatatcgtaaatagaggtggaaggtgtctcataccggtattcgccttaggaagagcccaggaattgctacttatcttagatgaatattggagtcaacatcccgaactccacgacatcccgatttattacgcttcatcgttagcgaagaaatgcatggccgtgtatcagacttacataaacgcgatgaacgacaaaatcaagcgacaaatagcgattaacaatccgtttgtattcaaacatatatctaacttgaagggtattgatcattttgatgatattggaccatgcgtagtgatggcatccccgggtatgatgcaaagcggtttgtccagagaactcttcgaaacctggtgtacggacgcaaagaatggagttatcatagcaggttactgcgtggaaggaacgttagccaaaacgatattatcagaaccagaagaaatcacgaccatggtcgggcaaaaattgcctttaaaaatgtccgttgattacatatcgttctctgctcacaccgattaccaacagaccagcgaattcatacgaatattgaaacctcctcacctagtgttagttcacggtgaacaaaacgaaatgaatcgcttgaaagcggccctgcaaagggaatacgaagacgacagcaacactaccattaacatatacaacccgaggaacacgcattcagttgaattgtacttcaggggcgagaaaacggcgaaagtgatgggacaactggccgtcgatgagccgcaaacgggcaaaactctgaacggcatattggtgaaaaggaatttcaattaccacgttctgtcgcctgaagatttacccagtaagcttattctcgacgttcgtcgaattcgcgtgatgcatttaatttgcagaatacaccgatttgaatataagccaaatactgcaaaggcagagtttgcattattctggcaacagcgcggttttgaggtacatgatatcccaagtagccggtctgttggaatccatagatggggagaagaaaatgcgcgcatttaa

SEQ ID NO: 17 - DNA, 3993 bp, Phyllotreta armoraciae
atggacaacattccgcgtacgcacgaagatatcgaggcgcaaatacgcgacatacaatcgaagaagaaagaggccgaaaaggcgtccgaatcgccgcccgaaaaagtggcgaaactgggcgaaggcggttacttcgacagcgacatatacgaaggcaagggcaagtacgaagggtacgtaacatcgatagcagccaacgatgaagtcgacgatgaggaagaagacgtcggttacacgcacaaaagaccaggactcggagcccccgtggcccttctgaacgatgtcgctcaaagtgataaagattacgatccgttcgcagaccgccgaagacctaccatagcggatagggaagatgagtataggcaaaaaagaagaagaatgattatttcaccggaaagagtggatccttttgctgacggtggaaaaacgcccgatgtccaagcgagaaattactcgaaaattatgaaagagcaaatgctgaaaggcgaagaattggagcttcgtaaaaaaatcatagaaaaatccaaggacggctcgctgaagacgaccaatggcgattcaaccaaatcagcggcgccgaagaaaaggggccgatgggaccagaccgtcgacgacgcggtcgtaccgcaaaaaaagaaaaccctcagcgtttcgacgagcagtagcgccgcgacgcccgtctgggaaggagacaaaacaccggccgacatacgttgggacgaaacgccgggtcacaagggcagtgaaacgccgggcgcgacgcccggccaatcgacgcgtatgtgggacgccacgccgggaccggcgacgccgggcagagaaacgcccggtcattcgggcgacaagagcacgtcgagacgaaaccgttgggacgagacgcccaaaaccgaacgcgaaacgcccggtcattcgagcggttgggctgaaactcctcgaactgatagaatcggggccgatttgatacaggaaactccgactccaggtgcttcgaaacgtcgttctagatgggacgagacgccttcggcgactccctcgcaggccatgacacctggtgctatgactcctagcactcctcacggtaccccgcacgctacaccgactcacggtcacgctactcctctgctaaccccaggtggctcgactcccgtaggagcaaaggccatgtcgatggcgactcctacgccgggtcacttagcttcgatgacgcccgaacaactccaggcgtacagatgggagcgagaaatcgacgaacgcaatcgaccgtactccgatgacgagctcgacgcaatgttcccgcccggctacaaaattcttcctcctccggccggctacgtacccatcaggacgccggccagaaagctgacggccactccgacgccgctggtgggcggcaccccgaccggatttttcatacagcaggaggataagagcgcaaagtacatggacaaccagcccaaagggcagaatttgccgttcatgaagccagaagatgcccaatatttcgataagttgctcgtggatgtcgacgaggacgcgctcgctcccgaagaacaaaaagaacgtaaaatcatgaagttgttgttgaaaattaagaacggtacgccgcccatgcgtaaagctgccctacgacagattaccgataaagctagagagtttggagctgggccgttgttcaatcaaatcctgccgctgttgatgagccccacgttggaagatcaagagagacatttgctggttaaagtaatcgataggattttgtacaaactggacgatttggttagaccttatgtacacaaaattctagtagtcatcgaaccgttgttgatcgatgaggattattacgcgcgcgtagaaggtcgtgaaatcatctctaatctagctaaagccgctggattggcgactatgatttccacaatgcgtcctgatatagataacatagatgaatacgtacgtaatacgacagctagagcattcgctgtggtagcttcggctttgggaattccctctttgctgccctttctgaaagccgtatgtagatcgaagaaatcgtggcaagctagacacaccggcattaaaattgtacaacaaatcgccatattgatgggctgcgcgattttgcctcacttgaaaagcttggtggaaattatagagcacgggctagtcgatgaacagcaaaaagttcgtaccattacggctttgggtatagctgctttggccgaagctgctaccccgtacggtatagaaagcttcgattccgtattgaaaccgctttggaaaggtataaggactcacaggggcaaaggactggccgctttcctcaaagctataggttacttgatacctcttatggactcggaatacgccaattattacacgagagaagtaatgttgattttgatcagggaattccaatcgcccgatgaggaaatgaagaaaatcgtgctgaaagtggtgaagcaatgttgttcgaccgacggtgtcgaatcgcaatacataaaagaagaaatcctgccacagtttttcaagcatttctggaaccacaggatggccttggacaggaggaactacaggcaattggtcgatactacagtggagattgcgaacaaagtgggagcttcggagattatcaatagaatagtggacgatctgaaagacgaaaacgaggcgtatagaaagatggtgatggagagcatagagaagattatggggaatctcggagcagccgatgtggattccagattggaggagcaattgattgatgggattttgtacgcttttcaagagcaaactaccgaggatgtggtgatgttgaatggattcggtacgatcgtcaaccaattgggtaaacgtgtaaaaccttatttaccacaaatttgcggtactatcttatggcgtttgaacaacaaatcagccaaagtgcgtcaacaggctgcagatttgatatcccgcatagccgtagtaatgaaaacctgccaggaggagaagctaatgggccatttgggtgtggtcctctacgagtatctcggagaggagtacccggaagttttaggttccattttgggcgcgttaaaagccatcgtaaacgttataggcatgactaaaatgacgccgcctatcaaagatctcctgcccaggctcacgccgatcctcaagaatcgccacgaaaaagtccaagaaaattgtatcgatcttgtgggccggatagccgatagaggacccgaatatgtatcggcacgcgaatggatgagaatctgtttcgagctgttagaactgctcaaagcccataaaaaggccattcgaagagctactgtgaatactttcggttacatagccaaagctattgggccacacgacgttttggccacgttgctgaataacctcaaagtacaagaacgtcaaaatagagtgtgcaccacagtcgctatagctattgtagcggaaacttgctcgccttttacggtgctaccggctttgatgaacgaatacagggtgcccgaattgaacgtgcaaaacggggtgttgaaatctctgtcttttctgttcgaatacatcggggaaatgggtaaggattacatttacgctgtggcgccgttgctggaggacgctctgatggatagagatttggtacacaggcaaaccgcttgcgctgccatcaagcacatgtctctaggagtgtacggatttggttgcgaggacgctctggtgcatcttttgaactacgtgtggccgaacatattcgaaacgtcgcctcacttggtacaggcttttatggacgccatcgaaggcatgcgggtggcattgggaccggttaaaattctgcaatacactctgcaggggctgtttcatcccgccaggaaggtcagggacgtctactggaagatttacaattccttatatatcggaggccaggatgctcttgtcgcaggttatcctaggatcatgaacgatcccaaaaatcagtacgttagatacgaattggattatatattgtga

SEQ ID NO: 18 - DNA, 804 bp, Psylliodes chrysocephala
atgtctaaagtaaacgaagtagctgatttatataaacagttaaaatccgaatggaacacaaaaaatcccaatttaagcaaatgtgagaagtttctgtcacagttgaagcttgaattgacacatttgatgtttttaccgacatctacagctacagcaaccaagcaagaacttcttttagccagagatgtgttagagattggagttcaatggagtatagctgcaaatgatataacggcttttgaaagatatatggctcaactaaaatgctattattttgattacaataaccaacttccagaatctgcatttaaatatcaattattgggtttaaatttgctgtttttgttgtcccaaaatagagtagctgaatttcatacagaattggagttgttgccatctgatcatattcagaatgatgtttatataaggcatccattgtctattgagcaatatttaatggagggaagttataataaaatatttcttgcgaaaggcaatgtacctgcagctaactacaactttttcatggacatattgctggataccataagagttgaaattgcagattgcttgtcagtggcttatgaaaagatatcagtgaaggatattgctagaatgctgtacctgcctaatgaagaggcagcgaagaatttcgccaaaaaggctttccaaaataaggcttggaaattaaacaatgaatttttccattttattcctgaagaaaaaactcatgaaccgattccttccaaagaattggcacagcaagcaatagaatatgccaaggaacttgaaatgattgtttaa

SEQ ID NO: 19 - DNA, 456 bp, Psylliodes chrysocephala
atgggtcgtatgcacgcacctggtaaaggtattgcccaatcggcattaccctacagaagaagtgtccctacatggctcaaagtaactcccgaggaagttaaggaccacattttcaagttaggaaagaaaggtttgaccccatcacaaattggtgtaatcctcagggattcctatggtgtagcccaagtaagatttgtttctggaaacaaaattttgcgaattatgaaggccatgggattagcccctgatctaccagaagatttgtactaccttatcaaaaaggctgtagctatccgcaagcatttggaaaggaataggaaggacaaggacagcaaattccgtttaattttggttgaatcacgtatccaccgtttggccaggtactacaagactaaatcagttcttgctcccaactggaagtacgaatctagtacagcctctgctttggttgcttaa

SEQ ID NO: 20 - DNA, 807 bp, Psylliodes chrysocephala
atggccgtcggtaaaaataagggtttgtcgaaaggaggcaaaaagggagttaaaaagaaggtagttgaccctttcacaagaaaagattggtacgatgttaaggccccatcgatgtttgccacccgacaagttggcaaaactttagttaatcgtacccaaggtaccaaaattgcatctgaaggtttgaaattcagagtttttgaagtatctttagccgatttacaaaatgataatgacgcggaaaggtctttcaggaagttccgtcttattgctgaagacgttcaaggtaggaatgttttaacaaatttccatggtatggatttgacaactgacaagttgaggtccatggtaaagaaatggcagactcttattgaggcatctgctgatgttaaaacgtctgatggttatttgcttagggtattctgcattggtttcaccaacaaagatcagctttcacaaaggaaaacgtgttatgcccagcatacacaagtcagagctatccgcaagaagatggtcgaaattatcacccgcgacatccaaggctcagacatcaaggaagtcgttaacaaactccttcccgacagcatagccaaggatattgagaaagcctgccagggcatctaccccctgcacgatgtgtacattcgcaaagtgaaggtactgaagaagccccgtttcgaactttccaaattgttggaattgcacggagacggcggtaaaggtggagctggtgacgtcggcggcgaggccgggtctaaggtcgacaggccagagggatacgaaccacctgtacaagaatcggtttaa

SEQ ID NO: 21 - DNA, 825 bp, Psylliodes chrysocephala
atgagctacgttctttgcccagagataccagctcctggtttttctttcgataattgtaaaagaaatgctacactggaaagcaaaggattcgctgtaccgaaagcaataaaaactggtacaaccattgtaggaataacttataaagatggagttatacttggagctgatactcgcgcaacagaagataccactgttgccgacaagaactgcgaaaaaattcactatctggcacctaatatgtattgttgcggagctggaactgctgcagatactgaaatgacaactcagatggtagcagcacaattggagttgcacaaactttatacaaatagggaatctagagttgcaactgccaatcaacttttaaaacagtacttatttagttatcaaggttatataggagctgctttaattctaggaggagtggatatagaaggcccccatttgtacatgattcatcctcatggttctagtgtggatctaccatacggaaccatgggatctggatcattggctgctatagcagtatttgaattgggttggaagcctgatatggaggaagaagcaggagttcaacttgtaagagatgctatagctgctggtattttcaatgacttaggatctggttctaatgttgatatttgcgttattcgcaaaggatcagtagattacaagaggacatatgacgaggcaaataaaaaaggtgtgaaacaaggatcatacaaatatcccagaggtactactgcagttttgtccactaaggttttagatgtagaggaggtatctgtaactcccatagaggccgaaaggatggacgttgtttag

SEQ ID NO: 22 - DNA, 582 bp, Psylliodes chrysocephala
atggcgcccgtagcgaagccaaaggatgctaaagataaaagagatgttaaagataaaaccaaaaaccacatgagggaattgcatatccgaaaactatgcctaaacatttgtgttggagaatctggtgacagacttactcgtgccgctaaggtattggaacagctcacaggccaacaaccagtattctcaaaagccagatacactgtcaggtcttttggaattcgtagaaatgaaaaaatagctgtacattgcacagtcagaggtgccaaggctgaagaaatcttggaaaggggtttaaaagttagagaatatgaattgagaagagataacttctcagcatctggtaattttggatttggtatccaagaacacattgatcttggtatcaaatatgaccctagtataggtatttatggtcttgacttctatgttgtattgggacgacctggattcaatgtagcccacaggagagcaaagaggggaaaagttggattttctcacaggttgactaaagaagatgccatgaagtggttccaacagaaatatgatggtataattttagcaagtaaagccaaaaaataa

SEQ ID NO: 23 - DNA, 459 bp, Psylliodes chrysocephala
atggctttggtaataccagagaagttccaacacattcttcgtatccttggtacgaatatcgatggtaagaggaaggtgcaattcgcccttacggcgattaagggtgttggtagacgttattccaatattgtattgaaaaaggccgatgtcaacttagacaaacgtgctggagaatgttctgaagaggaagtagaaaaaattattacaattatgtctaaccctcgtcaatacaaaatccctgactggttcttgaacagacagaaagatataattgatggtaaatatagtcagttgacttcctcgagtcttgattcgaaactccgtgaagatttagaaaggatgaagaagatccgtgcccacagaggtatgagacattactggggtctcagagtaagaggtcaacacaccaaaactactggacgtcgtggacgtactgttggtgtatccaagaagaagtaa

SEQ ID NO: 24 - DNA, 876 bp, Psylliodes chrysocephala
atgtcttctaatgtacaaaaagcgcagcaactaatggccgaggccgagaagaaagtttcctcaaggggatttttcggttctctttttggtgggtcaagccgtattgaagatgcagtggaatgttaccaaagggctgcaaacctttttaaaatggctaaaagttgggattcagcaggaaaagctttttgtgaagcagcaaatttgcattcaagaagtggtgctcgtcacgatgctgctacaaattatgtagatgcagcaaattgttataaaaaggctgacattaatgagtctgtaaactgcttgttaaaagcaatagaaatctacacagatatgggtagattcacaatggcagcaaaacatcatcaaacaattgctgaaatgtatgagactgactctgtcgacctagagagggctgttcaacactatgaacaagcagcagactactttagaggtgaagaaagcaattcatctgctaataaatgccttctaaaagtcgcccagtatgctgcccaacttgaaaattatgaaaaagcaatacagatataccaagaagtggcttattcagcattggagagctctctattgaagtacagtgccaaagagtatctgtttagggctgccctttgtcacttatgtgtggatgttctcaatgcccagcatgccatagaaagttatatacaaaggtacccagctttccaagattcaagagaatacaagttattgaaatcactgatagaacacattgaagaacagaatgttgatggttacacagatgctgtgaaggactatgattctatttcgcgtctggatcaatggtacaccacaatcctgttacgtattaaaaaacaactgaatgagagccctgatttgcgttaa

SEQ ID NO: 25 - DNA, 372 bp, Psylliodes chrysocephala
atgccgcccaaaacaagtggtaaagctgcgaaaaaggccggcaaggcccaaaagaatatttctaaaaccgataagaaaaagaagcgcaggaggaaggaaagttatgccatttacatttacaaagttttgaaacaagttcatcccgacactggaatttcgagtaaggctatgagcattatgaacagtttcgtaaacgatatcttcgaacgtattgctgctgaagcttctcgtcttgcacattacaataaacggtctacaataactagtagagaaatccaaactgccgttcgactattacttcctggtgaattggcaaagcacgcagtaagtgaaggtaccaaagccgttactaaatacaccagttccaaataa

SEQ ID NO: 26 - DNA, 354 bp, Psylliodes chrysocephala
atggcaagccatcaaagccatggtgttcaacagcttttagcagctgaaaaacgcgctgcagacaaagttacagaggctagaaaacgcaaagctaggaggctaaagcaagctaaagaagaggctcaagatgaaatcgaaaaataccgtaaggaaagggaacgccaatttcgcgaattcgaggctaaacatatgggctctaaagaggatgttgccgcaaaaattgaagtagacacaaagcgtaggattgaagaaatgaataaggctatcataagtcaaaaggaaccagttatactagaaattttgaaactggtctatgatatcaagcctgaaatacacaagaactaccgccaatag

SEQ ID NO: 27 - DNA, 375 bp, Psylliodes chrysocephala
atgtctggacgtggtaaaggtggaaaagtaaagggaaaggcaaagtcccgttcaaatcgtgcaggattacaatttccagttggtcgtattcatcgtttattaagaaagggaaattatgcagaaagagtaggagctggtgcacctgtatatttagcagccgtaatggaatatttggctgctgaagttctagaattggctggtaatgccgctagagataataagaagactcgtattatccccaggcatttgcaattggccataaggaacgacgaagaattgaataaattgctttccggagttacaattgctcaaggtggtgttttaccaaacattcaagctgtacttctgccaaagaagactgaaaagaaagcctaa

SEQ ID NO: 28 - DNA, 5694 bp, Psylliodes chrysocephala
atggctgcgacagatagtaaagctcctcttcgaactgttaaaagagtgcaatttgggatacttagcccagatgaaattcgacgaatgtcagttacagaagggggcatccgctttccagaaaccatggaagctggtcgccccaaattgtgtggacttatggacccacgacagggtgtcatagacagaagttctaggtgtcagacttgtgctgggaacatgactgagtgtcctggtcattttggacacatagatttagcaaaacctgtttttcacgtagggtttgtcactaaaaccatcaagattttgagatgcgtttgtttcttctgcagtaaattattagtcagtccgaacaatccaaaaattaaagaagtggtcatgaaatccaaaggacaacctcgaaaacgacttacctttgtgtatgatctatgcaaaggtaaaaatatttgtgaaggtggagatgagatggatgttggtaaagaaggagatgaaaataaaaaagctggacatggtggatgtggtagattccagcctaatatcaggcgagcgggtttggatttgacagctgaatggaaacatgccaatgaggatactcaagaaaagaaaattgctctctcagctgagagggtttgggaaattctaaaacatataactgatgaagaatgttttattcttggtatggatcccaaatttgctaggcctgactggatgattgtaacagtactccctgtgccacctttatgtgtgcggccagctgtagtaatgtttggttcagcaagaaatcaggatgatttgactcacaaattggccgatattattaaatcaaataatgatttacagaaaaatgaagcagctggtgcagctgctcatattatcacagagaatatcaaaatgttacagttccatgttgccacattagttgataatgatatgcctggaatgccaagggccatgcaaaaatctggaaaacccctaaaagccattaaagctagactgaagggtaaggaaggaagaattagaggaaatcttatgggtaaacgtgttgatttctctgcacgtactgtcattacacctgatccaaacttgcgaattgatcaagtaggagtgcctagaagcattgcacaaaacatgacttttccagaaattgtcacaccatttaattttgacaaaatgctcgagttagttcaaaggggcaattcccaatatcctggagctaaatatattattagagataatggtgaaagaatagatttaagattccatccaaaaccatcagatttacatctgcaatgtggttataaagtggaaagacacatcagagatggtgacttggtaatttttaaccgtcaacctactctccacaaaatgagtatgatgggtcacagggtcaaagtgcttccttggtcaaccttccgtatgaatctctcctgtacctcaccctacaatgctgattttgatggtgatgaaatgaatttacacgttcctcaaagtatggaaactagagcggaagtagaaaatattcatattacacccagacagattattactccccaagctaataaacccgtcatgggtattgtacaggacacattgacagctgtcagaaaaatgaccaagagagatgtcttcattgaaaaggagcagatgatgaacttgttgatgttcttacctatttgggatggtaaaatgcctcgccctgcaatcttaaaaccaaagcccttatggactggaaaacaattgttctctcttatcattccgggaaacgtaaatatgataagaacacattcaactcatcctgatgaagaagacgatggtccgtacaagtggatatctccaggagatacaaaagtaatggtagagcacggcgaattagttatggggatcttatgcaaaaaaacactaggaacatctgcaggttctcttcttcacatttgtatgttggaattgggacacgaagtatgtggaagattctatggtaacatccaaacagtaatcaacaactggttgttactggaaggtcacagtattggtattggtgacaccatcgccgatcctcagacatatactgaaattcagagggcgatcaaaaaggccaaagaggatgtaatagaggttattcaaaaagctcataatatggaattggaacctacacccggtaacacattgcgtcagactttcgagaatcaagtaaacagaattttaaacgacgctcgtgacaaaactggtgggtctgctaagaaatcgttgactgaatacaataatttaaaggctatggtagtatcgggttctaaaggttccaacattaacatttctcaggttattgcctgtgtaggtcaacagaacgttgaaggtaaacgtattccatttggcttcagaaaacgtacattgccacatttcatcaaggacgattacggtcctgagtctagaggttttgttgaaaattcgtatctagctggtctgacaccatctgagttttattttcacgccatgggaggtcgtgaaggtcttatcgatactgctgtaaaaactgccgaaactggatacattcagcgtcgtttaataaaggctatggagagtgttatggtacattatgatggtactgtaaggaattcagtaggtcaactcattcagttgagatatggagaggatggtctttgtggagaaatggtagaatttcagaccttatccactgtcaagttgagtaacaaagcttttgaaagaaagtttagatttgatcccagcaatgaacgttatctccgaagggtgtttaatgaagaagttatcaaacaacttatgggatctggagaagtaatctccgaacttgaaagagaatgggaacaattgcaaaaagatcgtgaggccttgagacaaatcttccctagtggggaatccaaagtcgtactaccttgcaatttacaaaggatgatttggaatgtacaaaaaattttccatattaataaacgctcaccaacagacttatcaccccttagagtaatacagggtgtgcgaacacttttaaagaaatgcattattgtagcaggagaggataggttatcaaaacaagctaacgaaaatgctacacttctattccaatgtttagtacgttcaactttatgcacaaaatgtgtgtctgaagaattcagattgagcactgaagcttttgaatggttgattggagaaattgaaactaggtttcaacaagcacaagcaaatcctggagaaatggttggcgctattgctgcacaatctttgggagaacctgctacgcaaatgacacttaatactttccattttgctggagtatcttccaagaacgtaactcttggtgtaccaagattgaaagaaattatcaatatatcaaagaagcctaaggccccctctttaactgtatttttgactggtgctgctgctagggatgctgagaaagccaagaatgtcttgtgcaggctggaacacacaactctacgtaaagtaactgcaaacaccgcaatttattatgatcctgacccgcaaaacacagttattcctgaagatcaagagtttgtaaacgtctattatgaaatgcctgactttgatccaactcgtatttcaccttggttactacgtattgaattagatagaaagagaatgacagataagaaacttaccatggaacaaatagcagaaaaaattaacgctggttttggtgatgatttgaattgtatcttcaatgatgataatgcagaaaagttagtactacgtatcagaattatgaacagtgatgacggaaagtttggagaaggtgctgatgaggatgtggataaaatggacgacgatatgttccttagatgtattgaagcaaacatgcttagtgacatgactttgcagggtatagaagccatttccaaagtgtacatgcatttaccccaaacggactctaaaaaaaggattgtcattactgatactggagaattcaaagccattgctgaatggttacttgaaactgatggtacaagtatgatgaaagtattatcagaaagagatgtggatccagtcagaaccttctctaatgacatatgtgaaatattttcggtattgggaattgaagctgtgcgaaaatccgttgaaaaagaaatgaacgctgtacttcaattctacggtctgtatgtaaactaccgacatcttgctttactttgtgatgtaatgaccgctaaaggtcacttgatggctatcacacgtcacggtataaacagacaagatacaggagctttgatgagatgttcttttgaagaaactgttgacgtactcatggatgctgcaagtcatgctgaagtagatcctatgagaggtgtatctgagaatattatcatgggtcagttgcctagaatgggaaccggttgctttgatcttttgttagatgccgagaaatgtaaaatgggcatccccattccacaagcgcatagttcagatctaatggcgtctggtatgttctttggatcagctgctacccctagcagcatgagccccggatgcgctatgactccatgggctgcagcaaataccccatatgttggcagtgcttggtctccacaaaatttaatgggcagtggtatgaccccaggaggagcggcattttcaccttctgcagcttcagatgcttctggaatgtcaccaggttatggcgcctggtctccaacaccacaatcaccagctatgtctccctatatgggttcacctcacggacaatctccatcttacagtccatctagtcccgcttttctacctacttccccatctatgacacctacatcacctagatattcgccaagttcccctggatattcacccacaagtcctaattacagccccacaagtcctagctactctcctacctcccctagttattcaccaacatctccaaattacagccctacttctcctagctactctcctacatctcctagttacagtccaacttcgcctagttattcaccgacatcgccaagttacagtccaacatctcctagctattctcctacatctcctagttacagtccaacttcgcctagttattcaccgacatcgccaagttacagtcctacatctcccagttattctcccacttctccaagttacagccccacttcaccaagttattcaccaacttctccaagttacagtcccacttctccaagttatagtccaacttcgccaagttattctccttcatcgccaaggtacaccccagcttccccaagttactctccgacatctccgagttattctccttcctcgcctcaatattctccagcttccccaagttattctccatcatctccaaaatattcaccaacttcgccgaattattcgcctacttctccgtcgttctctggtggcagcccacagtattctccaacgtcaccaagctattcaccaacttcgcccagttactctccatcgagtccacagcacactccggctggtagttcacgatattctccatcgtctcccaattattcacctagttccccaagttattcaccaacttcacctcaatattcccctcacagtaccaaatattcacctacttcacctacttacactcctacaagtccgagttattcacctgcctcacctgcatattctcctcaaccgcctaggtattcaccttcttcacctagctattcacctactagtcccaatcaggataatgattag

SEQ ID NO: 29 - DNA, 531 bp, Psylliodes chrysocephala
atgaaagccaaaggagagttgaaggaatatgaagtcatcgggcgtaagttgcccactgaaaaggagaaaaacactcctttatataaaatgagaatattctctcccgatccaattgtggctaaatcacgtttttggtatttcttgaggcaacttaggaagtttaagaaaacaactggtgaaatcgtatccgttagactaatacctgaaaagactccagttaagataaagaatttcggtatatggttgaggtatgactcccggtctggaacacacaacatgtacagggaatacagagaccttagcgtctctggagctgtaacagcttgctatagggatatgggcgcccgccacagagctagagctcatgctattcaaatcatcaaagtggaacaggttaaagcatctgacaccaggaggccacaagttaaacaattccatgattcaaaaattcgtttcccactacccaaacgtattcaacataggtcaatgaatcgtttctctgtccgcaaacccagaacatactttttgtaa

SEQ ID NO: 30 - DNA, 408 bp, Psylliodes chrysocephala
atgggtaaaataatgaaatcaggtaaagtcgtattggtccttggtggccgatatgctggtagaaaagctgttgttattaaaacctacgatgatggtacttcggacaaacagtatggacatgccttagttgctggtattgataggtatccaaggaaaatccacaaacgtatgggtaaaggcaaaatgcacaagaggtctaagatcaagcccttcatcaaggtattaaactacaaccacctgatgcctaccagatattctgtagacttagcatcagatttaaaagtaactccaaaagaacttaaagacccaatgaagaggaagaaggccaggttccaaaccagagttaaatttgaggaaaggtacaagcaaggcaagaacaaatggttcttccagaaattgaggttctaa

SEQ ID NO: 31 - DNA, 405 bp, Psylliodes chrysocephala
atgtctataagacccgtataccgaccgaaaatagtgaaaaagaggactaagaagtttattaggcatcagtctgatagatatggaaaactaaagcgcaactggcgtaaaccaaagggtattgacaatagagtaaggaggagattcaagggacaatatttgatgccaaatattggttatggatcggccgctaaaactagacacatgttgcctacaggttttaggaaagtgttggttcataatgtgaaggaactagaagttcttctcatgcaaaatcgtaagtactgtgcagaaattgcccatggggtttcatccaaaaaacgtaaagacattgttgaacgtgctcaacaattaagcattagggtgacaaatggacatgcaagactgcgcagccaagaaaatgaataa

SEQ ID NO: 32 - DNA, 420 bp, Psylliodes chrysocephala
atggcaaatacaaacacagatctaacagaagaagatgccgccgacttacaatttcccaaagaatttgaaaatgccgaaacgttgcttatttccgaggtccatatgctgttagagcatagaaaggatcaaaatgaatctgcagaagatgaacaagaattttcggatgtctttatgaaaaccttgacgtatactgatagatttcgcaaatttaaaaacaaggaaaccatatcggctgttagaaatttattaatgcaaaccaaaaaattacacaaatttgaattggccgctattgcgaatttgtgcccagaaaccactgaagaggcaaaatctctaattccttccctggaagggcggtttgaagacgaagaacttcaagctatattggatgatattcaaacgaagaggagtatacagtattga

SEQ ID NO: 33 - DNA, 2067 bp, Psylliodes chrysocephala
atggcttataaaagaaaaccagattcacaagttccagctgaagaaagcgaccaattaattatacgaccattaggagctggacaagaagtcggaaggtcctgcattatgatagaatttaagggaaagaaaattatgcttgactgtggtatacatcctggattgtcaggaatggatgcattaccatttgtggatttaatcgaagctgatgaggtcgactttcttcttatatcacattttcatcttgaccacagtggtgctttaccctggtttttacaaaaaactagttttaaaggaagatgtttcatgactcatgcaaccaaagctatatacagatggcttttatcagattatattaaagttagtaatattgcaacagaacaaatgttatacacagaagcagatttggaagctagtatggataagattgaaactataaatttccatgaagagaaagatataatgggggttaaattttgggcttacaatgctggacacgttctaggtgctgctatgtttatgttagaaatagctggtgtcaaaattttatatacaggagacttttctcgccaagaagacaggcatttaatggctgcagaaatacctacagtacatcctgatgttttaatcacagagtctacttatggcacccatattcatgaaaaacgtgaagatcgtgaatcccgtttcacctcattggttaatgaaattgtaaatagaggtggtagatgtctaattccagtatttgcccttggaagagcacaggaattattgctcatattagatgaatattggagcctgcatccagaacttcatgatattccaatttactatgcttcttctttagcaaagaaatgtatggccgtgtaccaaacatacataaatgcaatgaatgataaaataaaaaggcaaattgctgtaaataatccatttgtgttcaaacatatttctaatttaaagggaatcgatcatttcgaagatatagggccctgtgtggtgatggcatctccgggtatgatgcaaagcgggttgtccagagaacttttcgaaacttggtgtacggatgtaaaaaatggcgttataatagcgggttattgtgtagaaggtactttagctaaaacgatattatcagaacctgaagaaattacaacaatggttggacaaaaactgcctctaaagatgtcagtcgattatatatcgttttctgcgcatactgactatcagcagacgagcgaatttattaggctattaaaaccgcctcatgtagtcttggttcacggcgaacaaaacgagatgaatcgtttgaaggcggccctccaaagggagtacgaggacgatcccaatacaacgattaatatttacaatcccagaaacacgcattcggtcgagttgtattttagaggtgaaaaaaccgccaaagttatgggaaaactcgcggtcgatcaaccacaagccggaaaaaccttgaatggtatcctggttaagaggaatttcaattatcatatattgtctccagacgacttgtcaaaatacacagatttaaacatcagtcagatattgcaacggcaaagtttacactattctggaaacagcggtgttctgaggtatatgatttcgcaggtagctggtctattagagtccatagacggagaaaagaaaatgaaagcttttaacgccatcgatataacgatcgaacataaaattgtcaccttggaatgggtcgctaaccctgtgaacgacatgtacgcagactcgatagtcgctgctatcctgcaagcagacttattagacgtacccgtgaaaaatatgacgacgtccgtcaaaattgacaggatgcatttcaaagagtgtctcattgagatgttgcaagatatgttcggagaagattctgtaccaaaaatattcaaaggtgaaaaattgtatgtaactgttaacgataaacgcgccgacattgatctaactaatttggaagttaaatgcgcggaagacgagacgtttcaacagatcgttcacacggctgtgacaaagttgtatcagtcgttggcgcctcctcaatttgaaacggtctga

SEQ ID NO: 34 - DNA, 3984 bp, Psylliodes chrysocephala
atggaaaacattccacgcacacacgaagatattgaggcacaaatacgggaaatacaatctaagaaaaaagaggtcccagctgatatatctccggataaggtagcaaaattaggcgaaggtggttttttcgataacgagatttatgaaggcaaaggaaaatatgaagggtatgtaacatctattgctgctaatgacgaagtggatgatgatgaagaggatgttggattttctcataaaagaacaggtttaggagcacctgtagctcttttaaatgatgttgctcagagcgataaagattatgatccatttgctgaccgtagaagagcaaccattgcagatagagaagatgagtacagacagaggaggagaaggatgatcatatctcctgaaagagtggatccttttgcagatggtggaaaaacgccagactttcaaaccaggaactactcccagattatgaaggagcaactactaaaaggggaagaaaatgagctccgcaaaaaaattattgaaagatcaaaggaaggtacattgaaaccaacaaatggtgaagctaaatcgacccctaagaaacgtggtcgatgggatcaaactgtagatgaagttgtagtgccacaaaagaaaaaaaccttgagcgtatctactagcagcgcatctgccacacctgtttgggagggagacaaaacaccggcagatatccgttgggatgaaactccaggacataaaggtagcgaaacaccgggcgcaactccaggtcagtctacaaggatgtgggactcgactccaggacctgcaactcctggaagagaaacgacgccaggccacggaggagataaaagcacatccagaagaaaccgttgggatgaaacaccaaagaccgaacgagaaacccctggtcattccagtggttgggctgaaactcctagaaccgaccgaactggagcagatcttatacaagaaactcccactcctggcgcgtccaaacgcagatccagatgggacgagactccctctgcaactccatcgcaagttatgacgcccggggctatgactcctactactcctcatggcactccacatggtactccaagtcacgggcattcaactcctttactaactcccggaggcagcactccagtgggtgttaaagccatggctatggccacacctacaccaggacacctagcatcgatgacgcctgagcaattgcaagcttatagatgggaaagagaaatcgatgagcgtaatcgtccatactcagacgaagaactagatgctatgttccctcctggttacaaggtccttcctccaccagctggctacataccaattagaaccccagctagaaagttgacagccacgcccactcctttagttggaggaacgcccacaggcttctttatgcagcaagaagataaacaagcgaaatatttggataaccaaccaaagggacagaacctgccgtttatgaagccagaagatgcacaatatttcgacaaacttttagtagacgtcgatgaggaagcgcttagtccagaggaacaaaaagaacggaaaataatgaaactgttgctgaaaatcaagaacggcactcctcctatgcgtaaagcagctttaaggcagattacagataaggcgagagaattcggtgccggaccgttattcaaccagattttaccgctattgatgagtcctaccctcgaggatcaagaacggcatttgttggtgaaagtaatcgataggattctgtataaattggatgatctggtcaggccttatgtgcacaaaattctcgttgttattgaacccctgcttatcgacgaagattactacgctcgtgtggaaggtcgtgagatcatatccaacctcgccaaagccgccggtcttgccactatgatctctacgatgagacctgatattgacaacatcgacgagtacgtcagaaatacaactgcgagagctttcgccgttgtagcttccgctttgggaattccttcactgttgcctttcttaaaggccgtttgtaggtcaaagaaatcttggcaggccaggcatactggtattaagatcgttcagcagatcgctatccttatgggttgtgcaattttgccacatttgaaatctttggtggagattattgagcatggattggtggatgagcaacaaaaagtcaggaccattaccgctttgggtatcgccgcccttgctgaagcagctaccccttacggtattgaaagtttcgactccgtactgaaacccctctggaaaggtatcagaactcatcgcggtaaaggtttggccgctttcctcaaagctatcggttacttgattccccttatggatgccgaatatgcgaactactatactagggaagtaatgttgattttgatcagagagtttcagtctcccgacgaagaaatgaagaaaatcgtattgaaggtcgtgaagcagtgttgttcgacggacggtgtcgaagcgcagtatatcaaagaggaaattttgccgcaattcttcaagcacttctggaaccacaggatggctctggataggcgtaattacagacaactagtagatacgaccgttgagattgctaataaagttggagcttccgaaatcatcaatagaatagtggatgatcttaaagacgaaaatgaagcgtacaggaaaatggtaatggaaagtattgagaaaataatgggtaacctcggagctgctgacattgattctagactagaggaacagttgattgacggtatattgtacgcgtttcaggaacaaactacagaagatgtcgttatgttaaatggttttggtaccatcgtcaatcaacttggaaaacgcgtcaaaccctacttaccccaaatttgcggtaccatattgtggagattgaataacaaatcggccaaagtgagacagcaagcggctgatttaatttcaaggatagcagtcgtgatgaaaacgtgtcaagaagaaaaactcatgggacatttgggtgttgtactatatgagtacttgggtgaagaatatccagaggtacttggatccattcttggagctttaaaagctatagttaatgttataggtatgacaaaaatgactccacccatcaaagatctgttgcctcgtttgacgccaattttgaagaacaggcacgaaaaagtccaggagaactgcatagatttggttggtcgtatcgccgatagaggtccagagtatgtttctgctagagaatggatgagaatttgttttgagttactggaattactcaaagctcacaagaaagcgattcgtagagctacagtaaacactttcggatatatagccaaagctataggtcctcacgacgtgctggccactttactgaataacttaaaagtacaagaacgtcaaaaccgcgtctgtacaaccgtagccatagccattgtagctgaaacttgttctcccttcaccgtattgccagctctaatgaacgaataccgcgtaccagaattgaacgtccaaaatggagttttgaagtcactttctttccttttcgagtacataggagaaatgggcaaggattacatttatgccgtagctccgctcttagaagacgctttaatggacagagacttagttcaccgacagactgcttgtgctgcaataaagcacatggcacttggtgtgtatggttttggttgtgaggacgcgctcgtccatttgttgaactatgtctggcccaatatattcgaaacgtcgccacatttggtgcaggccttcatggacgccatcgaaggaatgcgagtagctttaggacctattaaaattctacaatataccttgcagggtcttttccatcctgcaagaaaggtgagagatgtttattggaaaatatacaattctttgtacattgggggacaggactcgttagtgtgtggttacccgaggatagccaatgatcctaagaatcagtatattagatatgaattagattatgtattgtaa

SEQ ID NO: 35 - DNA, 804 bp, Phyllotreta nemorum
atgtccaaagtaaatgaagtggctgatttatacaaacaattgaaatcagaatggaatacaaaaaacccaaacttaagtaaatgcgagaaactcctgtctcaactgaagctcgaattgaccaatttgatgtttctgccaacttcaacagcaacagctacaaagcaggaattactactagctcgtgatgtcttagaaattggtgtacaatggagcgtagcagccaatgatataaccgcattcgaaagatatatggctcagttgaaatgctactatttcgattacaacaaccagcttccagagtctgcatttaagtaccaattactgggattgaatcttctgttcttattgtcgcttaacagagtggccgaatttcatacagagttggaacttttaccagctgatcacatacagaacgatgtgtacataagacatcctttgtcaattgagcaatacctaatggaaggaagttacaacaagatattccttgcgaaaggtaatgttcctgcagcaagctacaccttttttatggatatactgcttgatacgattagagttgaaattgccgattgtttatcagttgcctatgaaaaaatatctgtgaaagattttactagaatgctctatttgccgaatgaagaaacggctaagaattttgccaaaaaggcgtttcaaaacaaggcctggaaattagaccacgactacttctactttattcccgagcagaagactcatgaacctattccttcgaaagaattggcccagcaagcaattgaatacgccaaggaacttgaaatgatcgtttaa

SEQ ID NO: 36 - DNA, 456 bp, Phyllotreta nemorum
atgggtcggatgcacgctcccggtaaaggtatcgcccagtcggccctaccctacagaagaagcgtccctacgtggctcaaggtaacccccgaagaagtcaaagagcacatcttcaaattgggcaagaaaggcctcacgccgtcccaaatcggtgtcatcctgagggattcctacggagtggcccaagtaaggttcgtgtccggcaacaagatcctccgcatcatgaaggccatgggactggcgcccgacctacccgaggacttgtactacctcatcaagaaggccgtggccattcgcaagcacttggagaggaacaggaaggacaaggacagcaagtttcgcttgattttggtagagtctcgtatccaccggctcgccaggtactacaagactaaatcagtcctagcacccaactggaaatacgaatcgagcacggcctccgctctggtcgcttaa

SEQ ID NO: 37 - DNA, 807 bp, Phyllotreta nemorum
atggccgtcggtaaaaataagggtttgtcgaaaggaggcaagaaaggtgttaaaaagaaggtgatagatcctttcacgaggaaggattggtacgatgtcaaggcaccgtcgatgttcaccacgcgccaagttggcaagaccttggtcaaccgtacccaaggtaccagaatcgcatctgaaggcctgaaattcagagtcttcgaagtttcattagccgacttacagaacgataatgacgccgaaaggtctttcaggaaattccgtttgattgctgaagatgttcaaggtaggaacgtattaaccaatttccatggtatggacttgaccacagataagttgcgatcgatggtcaagaaatggcagactcttatcgaagcttctgctgatgtgaaaacatccgatgggtttttgcttagggtattttgtattggtttcaccaacaaagatcagcattcccaaaggaaaacgtgctatgcccagcatacacaagttagagctattcgcaagaagatggtggaaatcatcacccgtgacatccagggttccgatatcaaggaagtagtcaacaaactgttgcccgacagcatagctaaggatatcgagaaggcctgccaaggtatttacccgcttcacgacgtctacattcgtaaggtgaaggtactcaagaagccgcgtttcgacctttccaaattgttggaattgcacggcgacggtggcaaaggaggcgccggggacaccactggcgaaggcggttctaaagtagataggccagaaggatacgaaccacccgtacaggaaacggtataa

SEQ ID NO: 38 - DNA, 831 bp, Phyllotreta nemorum
atgagctacactttgtgcccggaaataccagcgccaggattttcattcgaaaactgcaaaagaaatgccttactggaaagcaaggggttcaccactcccaaggcgataaagacaggtaccacaatcgtcgggatagtttacaaagatggcgtgatacttggggccgatactcgagctacagaagataccacggtggccgataaaaactgtgagaaaatccactttttggcaccaaatatgtactgctgtggtgcaggaactgccgcagacaccgaaatgaccactcaaatggtagcagcgcaactggaactgcataagctctacacaaacagagaagctcgcgtagcgacagccaaccagctcctgaagcaatatttattcagctaccaaggctacattggagccgctctcattctcgggggcgtagacatcgaagggccccatttacatatgatttaccctcacggttccagcgtggacttgccttacgccaccatgggttccggttctttagccgctatatcagtgtttgagttgggctggaagcccgagatgggagaagaggagggcattcagctcgttagaaacgctatagctgctggtatctttaatgacttaggatctggttcgaacgttgatgtttgtattataagaaagggggtggtggattacagaaggacctacgacgaggccaataagaaaggagtcagacaggggtcgtacaaatttccaagaggcgctacagccgttttgtctactaaagttgtcgatgtagaggaagtttctgttactcctgtagaagctgaacgaatggatgtgagttcgatataa

SEQ ID NO: 39 - DNA, 507 bp, Phyllotreta nemorum
atgcgagaattgcatatccgaaaattatgccttaacatttgtgtaggagaatctggtgacagacttactcgtgctgctaaggtgttagaacaactgactggtcaacaaccagttttctccaaagccagatacaccgtcaggtcttttggaattcgtagaaacgaaaaaattgctgttcactgcacagtaagaggcgcgaaggccgaggaaatattagaaaggggcttaaaagtcagagaatacgaattgaggagggataacttctctatctctggtaacttcggtttcggtatccaagaacacattgatcttggaatcaagtacgaccctagcataggtatttacggtcttgatttctacgttgtgttggggcgccccggttttaacgtagcccaccgaagagcgaagaagggaaaagttggtttctctcataggctaaccaaggaagacgctatgaagtggttccaacagaagtacgacggaataatcttagcgagtaaaaaatag

SEQ ID NO: 40 - DNA, 426 bp, Phyllotreta nemorum
atgtctttggtaattccggagaaatttcaacacattcttcgtatcctcggtacgaatatcgatggaaaaaggaaagtgcaattcgccctcactgccattaagggtgttggtagacgttattccaatattgtcttgaaaaaggcagatgtgaacttggacaaaagggctggagaatgttccgacgaagaagttgaaaaaatcattactattatgtctaatcctcgtcaatacaaaattcctgactggttcttgaacagacaaaaggatattattgatggtaaatacagtcagctaacttcttcaagtcttgactcgaaattgcgtgaggatttggaaaggatgaagaagattcgtgcccacagaggtatgagacactactggggtcttcgtgtgagaggtcaacacaccaagactactggacgtcgt

SEQ ID NO: 41 - DNA, 876 bp, Phyllotreta nemorum
atgtcatccaatgagcaaaaggctcagcaattaatagctgaagctgagaagaaagtgtcctcaaggggatttttcggatctctcttcggagggtccaatcgcattgaagatgcagtggaatgttaccaaagggctgcgaatttgtttaaaatggcgaaaaactgggatgctgctggtaaggccttttgtgaagcagcaaacttgcattcgagaagcggggcccgtcatgattctgctactaatttcgtagacgcagccaactgctacaagaaagctgacgtcagtgaggctgttaattgcttgctgaaagctatagaaatctatacagacatgggaaaatttacgatggcagccaagtaccatcaaaacattgccgaaatgtacgagactgatccagttgacctagaacgagccgttcagcactacgaacaggccgcggactacttccgaggggaagagagcaattcgtccgcaaacaaatgtcttctgaaagttgcccagtacgcagcgcagctcgaaaactacgaaaaagcaatacaaatctaccaagaagtagctttttcggctctagagagctctctgttgaaatacagtgctaaggagtatctgtttagggctgccctctgccatttatgtgtggatattctcaatgcccagcacgctgtagaaagttatattcaaaggtatcctgcattccaagattcccgagaatataaattgttgaagacgttgatggaacacattgaagagcagaatgttgatggatacacagatgctgtcaatgattatgattctatttctcgtttagatccttggtatactacgatcttgctgcgtattaaaaagcaacttaatgagagtcccgatttgcgttaa

SEQ ID NO: 42 - DNA, 271 bp, Phyllotreta nemorum
cccgataccggtatttccagtaaggcgatgagtattatgaacagtttcgtgaatgacatcttcgaaagaattgccgccgaagcttctcgtctggctcattacaacaaacgttctactataactagtagagaaatccaaactgctgtgcgtctgctacttcccggtgaacttgccaaacacgccgttagtgaaggaactaaggctgttaccaagtacaccagctccaaataattcgcctacaacaaatacgttggcagcgcatgtattttta

SEQ ID NO: 43 - DNA, 354 bp, Phyllotreta nemorum
atggctagtcatcaaagccagggtgttcagcaactgctggcagcagaaaagcgagctgctgacaaagttacagaggccagaaaacgcaaagccaggaggctgaagcaggccaaggaagaggcccaagatgagatcgagaagtaccgtaaagaaagggaacgccaattccgcgaattcgaagccaagcatatgggctctaaagaggatgtcgcttcgaagatcgagcaggacaccaagaggagaatcgaggatatgaacaaggctatccagagtcagaaggaacccgtgattgaaaacatcttggaattggtgtacgatatcaagccggaaatccacaagaattaccgtcagtaa

SEQ ID NO: 44 - DNA, 375 bp, Phyllotreta nemorum
atgtctggtcgcggtaaaggtggtaaagttaagggaaaggcaaagtctcgttccaatcgtgccggattacaatttcctgtaggtcgtattcacagattgttgagaaaaggaaattatgctgaaagagttggtgccggtgctccggtatacttggctgctgttatggaatatttagccgccgaagtattggaattggccggtaatgcagcccgtgacaacaagaaaacaagaataattccaagacatttgcaattggcaattagaaacgacgaggaattaaataagttactttctggtgttacgatcgctcaaggaggtgtcctaccgaacatccaagcagtgcttcttcctaagaagaccgagaagaaggcttaa

SEQ ID NO: 45 - DNA, 5694 bp, Phyllotreta nemorum
atggctgcaacagatagcaaggctccgcttagaactgttaaaagagtgcagtttggaatacttagtcccgatgaaattcgtcggatgtcagttacagaagggggcatccgctttccagagaccatggaagcgggtcgccccaaaatttgcggtctcatggatccgagacagggtgttatcgaccgaagctcccgatgccagacttgcgctggcaacatgaccgaatgtccaggccacttcggacacgtagacttagctaagccagtgtttcacatcggattcataacgaaaaccataaaaatcctcagatgtgtgtgcttcttctgcagcaagttgctggtcagccctaacaatcctaaaatcaaagaaatcgtaatgaagacgaaaggtcaaccgagaaaacgactcacgttcgtgtacgatttgtgcaagggtaaaaacatttgcgaaggtggggacgagatggatgtgggtaaagaaggcgatgaaagtaagaaggccggacacggaggatgcggtagatatcagccgaacatcaggagaatcggtctggatttaacggccgaatggaagcatgtcaacgaagacacgcaagagaagaaaatcgctctatcggccgaaagagtttgggaaatactgaaacacatcactgacgaggagtgcttcattctcggtatggatcccaaatttgccagacctgactggatgattgttacagtattgcctgtacctcctttatccgtacgtcctgctgtagttatgtacggatcagctagaaatcaagatgacttgactcacaaattagcagatatcattaaatctaacaatgagctgcagaagaatgaagctgctggtgctgctgctcacattatcactgaaaatattaaaatgttacaattccatgtagccacattggttgataatgacatgcccggtatgcctagggctatgcaaaaatcaggaaaacctctaaaagccattaaagctcgcttgaagggcaaagaaggcaggattagaggtaatcttatgggtaaacgtgtcgatttctcagctagaactgtcattactcccgatccgaatttgcgaatcgatcaagtcggcattcccagaagcatcgcacagaacatgacttttccggaaatcgtcacgcctttcaatttcgacaagatgttggagttggttcagaggggaaactcccaatatccaggagccaaatacattattagagacaacggagaaagaatcgatttaagatttcatccgaaaccatcagatttacatttacaatggggatataaagtggaaaggcacatcagagacggcgatttggtaatattcaaccgacagcccactctccacaaaatgagtatgatgggtcacagagtcaaagttttgccttggtcgacgtttcgaatgaatttatcttgtacgtctccttacaacgccgatttcgatggcgacgaaatgaacttgcacgtaccgcaaagtatggaaaccagagctgaagtggagaacatccatatcacacccaggcagattatcacaccgcaagcgaacaaacccgtcatgggtatcgtacaggacactttaacggctgttagaaagatgaccaaacgagacgtgttcatagagaaggaacaaatgatgaatttgcttatgtttttgcctatttgggatggtaaaatgcctcgtccagctatcttaaagccaaaaccactgtggaccggcaaacaattattttctctcatcattcccggaaacgtaaatatgatcagaacgcactccactcaccccgacgacgaagacgacggtccctacaagtggatatctccaggtgatacgaaagtaatggtagaacacggtgaattagtaatggggatattgtgtaagaaaacccttggtacatcagcaggttcgctacttcatatttgtattttggagttgggtcacgaggtttgcgggagattttacggtaacatccaaacagtcatcaacaattggttgttactcgaaggtcacagtatcggtatcggtgatgccattgccgatccgcagacgtacactgaaattcgacgagccattaaaaaagccaaagaagacgtaatagaggtcatacagaaggctcacaacatggaactggaacctactcccggtaatacgttgcgtcaaacattcgagaaccaagtaaacagaatattgaacgatgcccgtgacaaaactggaggttccgcgaaaaaatccctaactgactacaataatttaaaggccatggtcgtgtcgggttccaaaggttccaacatcaatatctcacaggttatcgcttgtgtaggccaacagaacgtggaaggtaaacgtatcccgttcggcttcagaaaacgcacgttgccgcacttcatcaaagacgattacggtcccgagtcgagaggtttcgtagaaaattcctacctcgccggtctgactccctccgagttctatttccacgccatgggagggcgtgaaggtctcatcgataccgccgtaaaaaccgccgaaaccggttacattcaacgtcgtttgatcaaagccatggagagcgtcatggtgcattacgacggcaccgtaaggaattcggtaggtcaactgatccagctgaggtacggcgaagacgggctctgcggtgaaatggtcgagtttcaaacattgtccacggtgaagctcagcaacaaagcgttcgaaagaaagtttaggtttgatcccagtaatgaacggtaccttcgaagagttttcaacgaagaagtgatcaagcagttaatgggttccggggaggttatttcggagctcgaaagggaatgggaccaacttcagaaggaccgggaagctcttagacagatcttccccagcggtgaatccaaagtagtactaccctgcaatttacaaaggatgatttggaacgtacaaaaaatattccacatcaacaaaagagcacctaccgatttatccccgcttagggtaatacaaggcgtaagggagttgctgaaaaaatgcatcattgtagcaggagaggatcgtttgtcgaagcaggccaacgaaaacgccacgcttctcttccagtgtctggtgcgctccactttgtgtaccaaatgcgtttcggaggagttcaggcttagcacggaggcgttcgaatggttgataggagaaatcgaaacgcgtttccagcaagctcaagtgaacccgggcgaaatggtgggcgctctcgctgcccaatcattgggcgaacctgctacccagatgacattgaacaccttccactttgctggtgtatcatcgaaaaacgtaactctcggtgtgccgagattgaaggaaattataaacatatccaagaaaccgaaggctccttctttgacggtatttttaaccggtgccgccgcgagagacgctgaaaaagccaagaatgttttgtgccgactggaacatactactttacgtaaagtgactgcgaacactgctatttactacgatccggacccacagaatacagtcataccggaagatcaggaattcgtgaacgtttattacgaaatgcccgatttcgatcctactcgcatttctccgtggctgctgcgtatcgaattggacagaaaaagaatgaccgataaaaaactcaccatggagcaaatcgctgagaaaatcaacgccggtttcggggacgatctcaattgcattttcaacgacgacaacgctgagaaattggtgctgcgcattcgtattatgaacagcgacgacgaaaaattcggagatggagccgacgaagacgtggacaaaatggacgacgacatgttcctcagatgcatcgaggccaacatgctgagcgacatgacgcttcaaggtatcgaagccatttcgaaagtgtacatgcacttgccacaaaccgactcgaagaaacgtatagtaatcaccgataccggcgaattcaaagccatcgccgaatggttgctcgaaacagacggtaccagtatgatgaaagtactgtccgaaagagacgtagaccctgttagaacgttttcgaacgatatttgcgaaatattctcggtgctgggaatagaagctgttcgaaaatcagtcgaaaaagaaatgaacgccgtactccaattttacggtctgtacgtaaactacagacatctcgctctgctttgcgacgttatgacggccaaaggacatttgatggccataactcgtcacggtataaacagacaagatacgggagcgctgatgagatgttcgttcgaagaaaccgtcgacgtgttgatggacgcttccagtcacgccgaagtcgatccgatgagaggggtttcagagaatatcattctcggtcaattgcctaggatgggaaccggctgtttcgacttgttattggacgctgacaagtgtaaaatgggcatacctatacctcaagctcatagttcggatcttatgacgtccggcatgttcttcggctcagcggcaacgcccagcagcatgagccccggcggcgctatgactccttgggctcaggcgaatacgccgtatgtaggcagcgaatggtcgccacaaaatatgatgggcagtggtatgactccaggaggagcagcgttttcaccatcagcggcatcggatgcttccggaatgtcgccggcttacggagcttggtctccgacgccccaatctccggccatgtctccttacatggcttcacctcacggccagtcgccttcgtacagtccatcgagtccggcattcatacccacctcgccgtctatgacgcccacatctccaggatattcgccgagttctccgggctattcgcctacgagtcctaattacagtccaacgagtcccagttactctccgacatctccaagttattcgcctacatcgcctagttacagccctacgtctccgagttattcgcctacttcacccagctacagtcctacgtctcctagttactcgccgacgtctcccagctacagccctacgtctccgagttactcgcccacttcaccgagctacagtcctacgtctccgagttattcgccgacgtcgccgagttacagccctacgtctccgaattattcgcctacatctccgaattacagccccacgtctcctagctactcgtcgacgtctcccagctactcgccgacttctccgagctacagccccagctcgcccagctactcgccctcttcgcctagatacacaccggcttcgcccaattattcaccgacgtctccgagctactcgccttcatcgccgcagtattcttcggcctcgccgagttactcgccttcttcgccgaaatattcgccgacgtcgccgagttattccccgacgtctccgtcgtttgcgggcggcagtccgcagtattcgccgacctcgccgagttactcgccgacgtcgcccagctactcgccgtcgagcccgcaacacacgcctgcgggcagctcgcgttactcgccgagctcgcctaattattcgccgagctcgccgagctactcgccgacttcgccgcagtattcgccgcgcagcacgaaatattcgccgacgtcgcccacgtacacgccgaccagtccgagttactcgccggcgtcgccggcttactcgcctcagccgcctaggtattcgccttcgtcgcccagctactcgccgaccagccccgggcaagacaacgactaa

SEQ ID NO: 46 - DNA, 531 bp, Phyllotreta nemorum
atgaaagctaaaggagagttgaaagaatatgaagttatcgggcgcaaattgcccaccgacaaagagaaaagccccccattgtataaaatgaggatattctctcccgacccgagcgtggctaaatcgcgattctggtatgtcctgagtcagcttaggaaattcaagaagaccaccggagaaatcgtgtcggtcaagccggtacccgaaaaaacccctaccaaaatcaagaactttggtatttggttgaggtacgcttcccgttccggtacgcataacatgtacagggagtacagagacctcagtgtttctggagccgtaacggcttgttatagagatatgggagctcgtcatcgggctagcgcgcacgctattcagattattaaagtggaacaagttaagtcgagcgacaccaggaggccacaagtccaacaattccacgattcgaagattcggttcccgttgcccaaacgtatccaacaccagtctatgaaccgcttctctgtccgcaaacccaggacgtacttcttgtaa

SEQ ID NO: 47 - DNA, 408 bp, Phyllotreta nemorum
atgggtaaaataatgaaatctggtaaagtcgtattggtcctcggcggccgatacgccggaaagaaagccgtcgtcattaaaacatacgatgatggcacgtctgacaaacaatacggacatgctttagtcgctggtattgacaggtatcccaggaaaatccacaagcgtatgggtaaaggcaaaatgcacaaaaggtccaaaatcaagcctttcatcagaattttaaactacaatcacttgatgcccaccaggtattcggtagatttagcctccgatttaaaagtgactcctaaagacctcaaagatccgatgaagaggaagaaggtgcgtttccagacccgcgtcaagttcgaagaaaggtacaagcagggcaagaacaagtggttcttccagaaattgcggttctag

SEQ ID NO: 48 - DNA, 405 bp, Phyllotreta nemorum
atggctataagacctgtttaccgacctaaaatcgtcaagaagaggacgaagaagttcataaggcatcagtccgacaggtactcgaagctaaagcgaaactggcgtaaacccaagggtattgacaacagggtaagaaggagattcaagggccaatatttaatgccaaatattggttatggatcagcatctaaaactaggcacatgctacctacaggttttagaaaagtgttggtacacaacgtcaaggaactagaggttctactcatgcaaaatcgtaaatactgtgctgaaatagcccatggtgtttcatcgaaaaaacgcaaagatatcgttgaacgtgctcaacaattgagcatcagagtcaccaatggacacgctagattacgtagccaagagaatgagtag

SEQ ID NO: 49 - DNA, 420 bp, Phyllotreta nemorum
atggcgaacaccaacaccgatctaatcgaagaagacgccgccgacttgcagttccccaaagaattcgaaaacgccgaaactctgctcatatccgaagttcacatgctgctagagcacaggaaagagcaaaacgaatctctggaggacgaacaggaattttcggatgtgttcatgaaaactctaacttacacggacagatttagaaaattcaagaacaaagaaaccatatcggccgtcaggaatttattgatgcagacgaaaaaactccacaaattcgagctggccgccatagcgaacttgtgtccggagaccaccgaggaggcgaagtctctgataccctcgctggagggccgtttggaggacgaggagctccagtcgattttggacgacattcaaaccaaaaggagcatacaatattaa

SEQ ID NO: 50 - DNA, 1209 bp, Phyllotreta nemorum
atggcggtgtatcagacatacataaacgcgatgaacgacaaaatcaagcgacaaatagccattaataatccgtttgtattcaaacatatatctaacttaaagggtatcgatcattttgatgatattggaccatgcgtggtgatggcatcccctggtatgatgcaaagcggtttgtccagagaactgttcgaaacctggtgcacagacgcaaagaatggagtcattatagcgggttactgtgttgaaggaacgttagctaaaacgatattgtcagaaccagaggaaattacgaccatggttgggcaaaagttgccgttaaaaatgtccgttgattacatatctttttctgctcacaccgattaccagcagaccagcgaattcatacggattctgaaacctcctcaccttgtgttggttcacggggaacaaaacgaaatgaaccgtttgaaagcggcccttcaaagggaatacgaagacgatagcaacacaaccattaacatatacaacccgaggaacacgcattccgtcgagttgtacttcagaggcgagaaaacggccaaggtaatgggacagctagcagtcgatgaaccgaaaacagggaaaactttgaacggcatattggttaaaaggaatttcaattatcacgttttatctcctgacgatttacccaaatataccgatttgaatataagtcaaatactgcaaagacagagtctgcactattccggcaacagcggagttttgagatacatgatatcccaagtagccggcctgttggaatccatagacggggagaagaaaatgcgagccttcaatgcagtagatattataatcgaaaataaaattgtcattttagagtgggtggcgaatcccgtaaacgatatgtacgcagatgcgatagtagcggcgattttacaagctgatttattggaagcgcccattaaaaacgtgacgacctccgttaaaatggacaggatgcacttcaaggagtgcctcatcgagatgttgcaggacatgttcggggaagattcggtgccgaagatattcaagggggaaaagttgtatgtcgccgtgaacgacaaacgagctgatattgatctcaataatttggatgttaaatgtcccgaagacgaaactttccaacagattgttcagactgctgtgacgaaattgtaccagtcattggctcccccacaatttgaatcttag

SEQ ID NO: 51 - DNA, 3534 bp, Phyllotreta nemorum
atgaaagagcaaatgctcaaaggcgaggaactggagcttcgcaaaaagatcatagaaaaatccaaggacggctcgctgaagaccaccaacggcgaggccaccaaatcggcggcggcgccgaagaaacggggccgatgggaccaaacggtcgacgacgccgtcgtaccgcaaaaaaagaaaaccctcggcgtttcgacgagcagcagcgccgcgacgcccgtctgggaaggagacaaaacaccggccgacatacgatgggacgagacgccgggtcacaagggcagcgaaacgccgggagcgacgcccggccaatctacgagaatgtgggacgccacgccgggaccggcgacgcccggccgagagacgcccggtcattcgggcgataaaagcacgtcgagacgcaaccgttgggacgagacgccgaaaaccgaacgcgaaacgcccggccattcgagcggttgggccgaaacgcctcgaaccgatcgaatcggggccgatttgatacaggagactccgactccgggcgcttcgaaacgtcgatctagatgggacgaaacgccttcggccactccctcgcaggccatgacgcccggcgctatgacaccgagtactcctcacggtaccccgcacgctacgcctactcacggtcacgctactccactcttaacaccgggtggctcgactcccgtaggggcgaaggccatgtcgatggcgactcccacgccgggtcacttggcttcgatgacgcccgaacaactacaagcttacagatgggagcgagaaatcgacgaacgtaaccgaccctattcggacgatgaactggacgcgatgttcccgcctggctataaggtccttcctcctccggctggctacgtgcctatcaggacgccggccaggaagctgacggccacgccgacgccgttggtgggcggcacgcctaccgggtttttcatacagcaggaggataaaagcgcgaagtacatggacaaccagccgaaagggcagaatttgcctttcatgaagcccgaagacgcccagtatttcgataagctactggtggacgtggacgaagacgcgctggctcccgaagaacagaaagaacgtaaaatcatgaagttgttgttgaaaattaaaaacggcacgcccccgatgcgcaaagccgccctacgacaaatcaccgataaagctagagagtttggggccggtccgttgttcaatcaaatcctgccgcttttgatgagccccacgttggaggatcaagagaggcatttgttggtgaaagtcatcgataggattttgtacaagctagacgatttggtcagaccgtacgtgcacaaaattctcgtcgtaatcgaaccgttgttgatcgatgaggattattacgcgcgcgtagaaggccgtgaaatcatttcgaatttagccaaggcagctggattagcaactatgatttccacgatgcgtccggatatcgataacattgatgaatacgtgcgtaatacgacagctagagctttcgctgtggtcgcttcggctttggggattccctcgttgttgccttttctcaaagccgtatgtagatcgaagaaatcgtggcaggccaggcacaccggcatcaaaatcgtacaacaaatcgctatactaatgggttgcgcgattttgcctcacttgaaaagcttggtggagataatagaacacgggctggtcgatgagcaacaaaaggttcgtaccattacggctctggggatagccgctttggccgaagccgctaccccgtacggcatagaaagcttcgattccgtgttgaaaccgctttggaaaggtataaggactcacagaggcaaaggactggccgctttcctcaaagctatcggttacttgataccgcttatggactcggaatacgccaattattacacgagagaagtcatgttgattttgatcagggaatttcaatcgccagacgaggaaatgaagaagatcgttttgaaagtggtgaaacaatgctgttcgacggacggtgtcgaatcgcaatacataaaagaggaaattctaccgcagtttttcaagcatttttggaaccacaggatggccttggacaggaggaactacaggcaattggtcgatacgaccgttgagatagctaacaaagtgggcgcttcggagattatcaacagaatagtggacgatttgaaagacgaaaacgaagcttacagaaagatggtgatggaaagtatcgagaagatcatgggtaatctcggagcggccgatgtggattccagattggaagagcaattgatcgatggcattttgtacgcttttcaagaacaaactaccgaagacgtggtcatgttgaatggtttcggtacgatcgttaaccaactgggtaaacgtgtcaaaccttacttaccacaaatatgcggtaccatcctgtggcgtttaaacaacaagtcggctaaagtgcgccaacaggcggctgatttgatatcccgcatagccgtagtgatgaaaacctgtcaggaagagaaactgatgggccacttgggcgtcgtgctgtacgagtacctcggagaagagtacccggaagtgttgggttccatattgggcgctctaaaagccatagtaaacgttataggaatgactaaaatgacgcctcccatcaaagatctcctgcctaggctcacgcctatcctcaaaaatcgtcacgaaaaggtccaagaaaattgcatcgatctagtcggcaggatagccgatcgagggcccgaatacgtatcggcgcgcgaatggatgagaatctgtttcgagctattggaactcctcaaagcccacaaaaaagccatcagaagagctacggtgaacacgttcggttacatagccaaagccatcgggccgcacgacgttttggccacgttgctgaataacctcaaagtacaagaacgtcagaatagggtgtgcacgacggtcgccatagcgatcgtggccgaaacttgctcgcctttcaccgtcctaccggctttgatgaacgaatacagggtgcccgaattgaacgttcaaaacggggtgttgaagtccctgtcttttctgttcgaatacatcggcgaaatgggcaaggactacatttatgctgtcgcgcctttgctcgaagacgctctgatggacagagatttggtacacaggcaaaccgcttgcgcagcaatcaagcacatgtcactgggagtgtacgggttcggttgcgaggacgctttggtacacctgttgaactacgtgtggccgaacatattcgagacatcgcctcacttggtgcaggccttcatggacgccatcgagggcatgcgggtggccctcggacccgtcaaaatcctgcagtacactctgcaggggctgttccatccggctaggaaggtgcgggacgtttactggaagatttacaattctttgtacatcggagggcaggacgctctggtcgctggctatcctaggatcatgaacgatcccaaaaatcagtatgttcggtacgaattggattatatattgtaa

SEQ ID NO: 52 - DNA, 804 bp, Phyllotreta striolata
atgtccaaagtaaatgaagttgctgatttgtacaaacaattgaaatccgaatggaatacaaaaaacccaaacttaagtaaatgcgagaaactcctgtctcaactgaagctcgaattgactaatttgatgtttctgccaacttcaacggccacagctacaaagcaggaattacttctagcccgtgatgtcttagaaatcggtgtacaatggagtgtagcagccaacgatataaccgcgttcgaaagatacatggctcaattgaaatgctactatttcgattacaacaaccagcttcctgaatctgcatttaagtatcaattactgggattgaatcttctgtttttattgtcgcttaacagagtggcggaatttcatacggagttagaacttctgccggctgatcatatacagaacgatgtgtacataaggcatcccttatcgattgagcaatacttaatggaaggaagttacaataagatcttccttgcaaaaggtaacgttcccgcagcgagctacaccttttttatggacatactgcttgatacgatcagagttgaaattgcggattgtttatcagtagcgtatgaaaagatatctgtaaaggattttactagaatgctctacttgccgaatgaagaagctgctaaaaattttgccaaaaaggcttttcaaaacaaggcttggaaattagaccatgactacttctatttcattcccgaacagaaggcacacgaacctattccttcgaaggaattggcccagcaagcaattgaatacgctaaggaacttgaaatgatcgtttaa

SEQ ID NO: 53 - DNA, 456 bp, Phyllotreta striolata
atgggtcggatgcacgcgcccggtaaaggtatcgcccaatcggcgttgccctacagaagaagcgtccctacgtggctcaaggtaacccccgaagaagtgaaagagcacatcttcaaattgggcaagaagggtctcacgccgtcccaaatcggtgtcatcctgagggactcctacggtgtagcccaagtcaggttcgtgtccggcaacaagatcctgcgcatcatgaaggccatgggactggcgcccgatctacccgaggacttgtactacctcattaagaaagcagtggccatccgcaagcacttggagaggaacagaaaggacaaggacagcaagttccgtttgattttggtagagtctcgtatccaccggctcgccaggtactacaagaccaaatcagtcttagcccctaactggaaatacgaatcgagcacggcttcggctttggtcgcttaa

SEQ ID NO: 54 - DNA, 807 bp, Phyllotreta striolata
atggccgtcggtaaaaataagggtttgtcgaaaggaggcaaaaaaggagttaaaaagaaggtcatagatcctttcacgaggaaagattggtacgatgtcaaggcaccgtcgatgttcaccacgcgccaagtcggcaaaaccttggtcaaccgtacccaaggtactagaatcgcatctgagggcttgaaattcagagtcttcgaagtttcattagccgacttacagaacgacaatgatgccgaaaggtctttcaggaagttccgtttgattgctgaagatgttcaaggtagaaacgtattaaccaatttccacggtatggatttgaccaccgacaagctgagatcgatggtgaagaaatggcagactctcatcgaagcttctgctgacgtgaagacttccgatgggttcttgcttagggtattctgtattggtttcaccaacaaagatcagcattcccaaaggaaaacgtgctatgcccagcatacacaagttagagctattcgcaagaagatggtggaaatcatcacccgtgacatccagggttccgacatcaaggaagtagtcaacaaactgttgcccgacagcatagctaaggatatcgagaaggcctgccaaggtatttacccgcttcacgatgtctacattcgtaaggtgaaggtgctgaagaagccgcgtttcgacctttccaagttgttggaattgcacggtgacggcggcaaaggaggcgccggtgacaccaccggtgaaggcggttctaaagtagataggccagagggatacgaaccacccgtacaagaatcggtataa

SEQ ID NO: 55 - DNA, 831 bp, Phyllotreta striolata
atgagctacgttttgtgtccggaaataccagagccgggattttcattcgaaaactgcaaaagaaatgccttactggaaagcaagggatttaccacccctaaagcaatcaagacaggtactacaatcgtagggatagtttacaaagatggcgtgattcttggggctgatactagagctacagaagatactacggtagccgataaaaactgcgaaaaaatccactttctggcaccaaatatgtattgttgtggtgcaggaactgccgcagacaccgaaatgaccactcaaatggtagcagcccaactggaattgcataagctctacacgaaccgagaagctcgtgtagcgacagccaaccagctcctgaagcaatatttattcagctaccaaggctacattggagctgcgctgattcttggaggcgttgacatcgaagggccccatttgcacatgatttatcctcacggttccagcgtggatttgccttatgctaccatgggatccggttctttagccgccatatcagtgtttgagttaggttggaaaccagagatgggagaagaagagggcatccagctggttagaaacgctatagctgctggtatattcaacgatttaggatctggttccaacgtagatgtgtgtatcatacgtaaaggagtggtggattacagaaggacctacgatgaagccaataaaaagggcgtgagacaaggatcttacaaattccccaggggcgctacggctgttttgtctactaaagttgtcgatgtagaagaagtttctgttacacccgtagaagctgaaagaatggacgttgccgctttttaa

SEQ ID NO: 56 - DNA, 576 bp, Phyllotreta striolata
atggcgcccgtagcgaagcctaaggaatccaaagacaaaagagatgtcaaggataaaaccaaaaatcatatgcgggaattgcatatccgcaaattatgccttaacatttgtgtaggagaatctggtgacagacttactcgtgctgctaaggtattagaacaactgactggccaacaaccagtcttctcaaaagcccgatacaccgtcaggtcttttggaattcgtagaaacgaaaagattgctgtacactgcacagtaagaggcgcgaaggccgaggaaatattagaaaggggcttaaaagtcagagaatacgaattgaggagggataacttctctatctctggtaacttcggtttcggtatccaagaacacattgatcttggaatcaagtacgacccgagcataggtatctacggtcttgatttctacgttgtgttgggtcgccccggtttcaacgtagcccaccgaagagcgaagaaaggcaaagttggtttctctcataggttaaccaaagaagacgctatgaagtggttccaacagaaatacgacggaataattttagggagtaaaaaatag

SEQ ID NO: 57 - DNA, 459 bp, Phyllotreta striolata
atgtctttggtaattccggagaaatttcaacacattcttcgtatcctcggtacgaatatcgatggaaaaaggaaagtgcaattcgccctcactgccatcaagggagttggtagacgttattccaatattgtcttgaaaaaggcagatgtgaacctagacaagagggctggagaatgttccgacgaagaagttgagaaaattattactattatgtctaatcctcgtcaatacaaaatccctgactggttcttgaacagacagaaggacattattgatggtaaatacagtcagctgacttcttcaagtctcgactcgaagttgcgtgaggatttggaaaggatgaagaagattcgtgcccacagaggtatgagacactactggggtctccgtgtgagaggtcaacacactaagactactggacgtcgtggacgtactgttggtgtgtccaagaagaagtaa

SEQ ID NO: 58 - DNA, 876 bp, Phyllotreta striolata
atgtcatccaatgcacagaaggctcagcaattaatagctgaagctgagaagaaagtgtcctcgaggggtttcttcggatctctcttcggagggtccagccgcatcgaagatgcagtggaatgttaccaaagggctgcaaatctgtttaaaatggcgaaaaattgggatgctgctggaaaggccttttgcgaagcagcaaacttgcattcgagaagtggggctcgtcatgacgctgctactaatttcgtagacgcagccaactgctataagaaagctgacattagtgaggctgttaattgcttgctgaaagctatagaaatctatacagacatgggtaaatttacgatggcggccaagtaccatcaaaacattgccgaaatgtacgagactgatcccgttgacctagaacgagccgttcagcactacgaacaggcagcggactacttccgaggcgaagagagcaattcatccgcaaacaaatgtcttctaaaagtggcccagtacgcagcacagctcgaaaactacgaaaaagcaatacaaatctaccaagaagtagctttttcggctttagagagttccctgttaaaatacagtgctaaggagtacctgtttagggccgctctctgccatttatgtgtggatattctcaatgcccagcatgctgtagaaagttatattcaaaggtatcctgcatttcaagattcccgggaatataaattgttgaaaacgttgatggaacacattgaagagcagaatgttgatggatatacagatgctgtcaatgattacgattctatttctcgtttagatccttggtatactacgatcttgctgcgtattaaaaagcaactcaatgagagccccgatttacgttaa

SEQ ID NO: 59 - DNA, 372 bp, Phyllotreta striolata
atgccacccaaaactagtggaaaggcggctaaaaaagctggaaaagctcaaaagaacatttccaaagccgataaaaagaagaaaaggaggaggaaggaaagttacgcaatctacatttacaaagttttaaagcaagtacatcccgataccggtatttccagtaaggcgatgagcatcatgaacagtttcgtgaatgacatcttcgaaaggattgctgctgaagcttctcgtctggctcattataacaaacgttctactattactagtagagaaatccaaactgctgtgcgtctactccttcccggtgaacttgccaaacacgctgttagtgaaggaactaaggctgttaccaagtacaccagttcgaaataa

SEQ ID NO: 60 - DNA, 354 bp, Phyllotreta striolata
atggcaagtcatcaaagccatggtgttcaacaactactggcagccgaaaagcgagctgctgataaagtcacagaggccagaaaacgcaaagcgaggagactaaagcaggccaaggaagaggcccaagatgagatcgagaagtaccgtaaagaaagggaacgccaattccgcgaattcgaggccaagcatatgggctccaaagaggatgtagcctcgaagatcgaacaggacaccaagaggagaatcgaggatatgaacaaggctatccaaagtcagaaggaacccgtgatccaaagcatcttgggattggtgtacgacatcaagccggaaatccacaagaatttccgccagtaa

SEQ ID NO: 61 - DNA, 375 bp, Phyllotreta striolata
atgtctggtcgcggtaaaggtggtaaagttaagggaaaggcaaagtcacgttccaatcgtgccggattacaatttcccgttggtcgtattcacagattattgaggaaaggaaattacgccgaaagagttggtgccggtgctccggtatacttagccgccgttatggaatatttggctgctgaagtattggaattggccggtaatgcagcccgtgataacaagaaaacgagaattattccgagacatttacaattggcaattagaaacgacgaggaattgaataaattactttctggagttacgatcgctcagggtggtgtcctaccgaacatccaagcagtgcttcttcctaagaagaccgaaaagaaggcttaa

SEQ ID NO: 62 - DNA, 5280 bp, Phyllotreta striolata
atggctgcaacagatagcaaggctccacttagaactgttaaaagagtgcagtttggaatacttagtccagatgaaatccgtcggatgtcggttacagaagggggcatccgctttccagagaccatggaagcgggtcgccccaaaatatgcggtctcatggatcccagacagggcgtcatcgacagaagctcccgatgccagacctgcgctggcaacatgactgaatgtccaggccacttcggacacgttgatttagccaaaccagtatttcacattggattcataacgaaaaccataaaaatcctcagatgtgtgtgctttttctgcagcaaattgttggtcagccccaacaatccgaaaatcaaagaaatcgtaatgaagacgaaaggccaaccgaggaaacgactcacgtttgtttacgatctgtgcaaaggtaaaaacatctgcgaaggtggagacgaaatggacgtgggtaaggaaggcgatgaaggtaagaaggctggacacggaggttgcggtagataccagccgaacatccggagaatcggtttggatttaacggccgaatggaagcacgtcaacgaggacacgcaggagaaaaaaatcgctctatcggccgaaagagtttgggaaatactgaaacacatcaccgacgaggaatgcttcatcctcggcatggatcccaaattcgccagacccgattggatgattgttactgtgttgcctgtacctccattatccgtacgtcctgccgttgttatgtacggatcggccaggaatcaagatgacttgactcacaaattggcggatatcattaaatcgaacaatgagctgcagaagaatgaagctgctggtgctgctgctcacattattactgagaacattaaaatgttgcaattccacgtagccacgttggttgacaatgacatgcccggtatgcctagggctatgcaaaaatctggaaaacctctaaaagccattaaagctcgtctgaagggcaaagaaggtaggattagaggtaatcttatgggtaaacgtgtcgatttctcagctagaaccgtcattactcctgatccgaatttgcgaatcgatcaagtcggcattccgagaagcatcgctcagaacatgacttttccagaaatcgtcacgcctttcaattttgacaagatgttagagttggttcaaaggggcaattcccaatatccaggagcgaaatatattattagagataacggggaaaggatagatttgagatttcatccgaaaccttcggatttacatctgcaatggggatataaagtcgaaaggcacatcagagacggcgatttggtaatattcaatcgacaaccgactctccacaagatgagtatgatgggtcacagagtcaaagtattgccttggtccacgtttcgtatgaatttatcgtgtacgtccccttacaacgcggatttcgatggcgacgaaatgaatttgcacgtaccgcaaagtatggaaaccagagcggaggtggaaaatatccacatcacgcccagacagattatcacgccgcaagccaacaaacccgtcatgggaattgtacaggacacattaacggctgtcaggaaaatgaccaaacgagacgtgttcattgaaaaggaacaaatgatgaatttgctaatgtttttacctatttgggatggtaaaatgccccgtccggcgatattaaagcccaaacctctgtggactggtaaacaattattttctcttattatccctggaaacgtaaatatgatcagaacgcactctactcaccctgatgacgaagacgacggtccttataaatggatatctccaggtgatacaaaagtaatggtagaacacggtgaattagtaatgggaatattgtgcaagaaaactcttggtacatcagcaggttcactacttcatatttgtattctggaattgggccacgaggtttgcggaagattttatggcaacatccaaacggtcatcaacaattggttactacttgaaggtcacagtatcggtatcggtgatgcgatcgccgatccgcagacgtacacagaaatccgaagagccattaagaaagccaaagaagatgtaatagaggtcatacagaaagctcacaacatggaactggaacccacgcccggtaatacgttgcgtcaaacgttcgagaatcaagtgaacaggatattgaacgatgcccgtgacaaaaccggaggttccgcgaaaaaatctctaaccgactacaacaatttaaaggccatggtcgtgtcgggttctaaaggttctaacatcaatatttcacaggttatcgcttgtgtaggtcaacagaacgtcgaaggtaaacgtataccgttcggcttcagaaaacgcacgttgccgcacttcatcaaagacgattacggtcccgagtcgaggggcttcgtggagaattcctacctcgccggtctgactccctccgagttctatttccacgccatgggagggcgtgaaggtctcatcgatacggccgtaaaaaccgccgaaaccgggtacatccaacgtcgtttgatcaaggccatggagagcgttatggtgcactatgatggcaccgtaagaaattcggtaggtcaattgatccagctgaggtacggcgaagacggcctttgcggggaaatggtcgagttccaaacgctgtccaccgtgaagctcagcaacaaggcgttcgaaagaaagttcagattcgatcccagcaacgaacgataccttcgaagggtgtttaacgaagaggtaatcaagcaattgatgggttccggtgaggtgatttccgagctcgaaagagaatgggaccaacttcaaaaggaccgagaagcccttcggcaaatcttccccagcggcgaatccaaagtggtattaccttgcaatttacaaagaatgatttggaacgtacaaaaaatattccatatcaacaaaagggcgcctactgacttatcgccgcttagagtaatacaaggcgtaagggaattgttgaaaaagtgtataattgtagcgggagaggatcgtttgtcgaagcaggccaacgaaaacgccacgcttttattccaatgtctagtgcgctccactttatgcaccaaatgcgtttctgaggagttccgactcagcacggaggcgttcgagtggttgattggagagatagagacccgcttccagcaggctcaggtgaaccccggcgaaatggtgggcgctctagccgcccaatctttgggcgaacccgccacccaaatgacattgaacactttccattttgccggtgtatcatcgaagaacgtaactctcggtgtgccgagactgaaggaaattattaacatctcgaagaaaccgaaggcgccttctttgacggtgtttttgacgggcgccgctgcgagggatgccgaaaaagccaagaacgttttatgtcgactcgaacacactactttacgtaaagtcaccgcgaacactgccatttactacgatcccgatccgcaaaatacagtcatacctgaggatcaggaattcgttaacgtttattacgagatgcccgatttcgatcccactcgtatatccccttggctgctgcgtatcgaattggacaggaagagaatgaccgataagaaacttaccatggaacaaatcgccgaaaaaatcaacgccggtttcggtgacgatctcaattgcattttcaacgacgacaacgcggaaaaattggtgctgcgcatccgaatcatgaacagcgacgacgagaaattcggagacggagccgacgaggacgtggacaaaatggacgacgacatgttcctcaggtgcatcgaggccaatatgctgagcgacatgacgctccaaggcatcgaggccatttcgaaagtttacatgcatttgccacagaccgattcgaagaaacgcattgtaattaccgataccggcgaattcaaggccatcgccgaatggttgctcgaaacggacggtacgagtatgatgaaagtgctgtcggaaagagacgtggaccctgtcaggacgttttcgaacgatatctgcgaaatattttcggtgttgggaatagaagccgttcgaaaatcagtggaaaaagaaatgaacgccgtactgcaattctacggtctgtacgtgaactacagacacctcgcgctgctttgcgacgtgatgacggccaaaggacatttgatggccataactcgtcacggtataaacagacaggatacgggcgcgctgatgagatgctcgttcgaagaaaccgtcgacgtactgatggacgcctccagtcacgccgaagtcgatccgatgagaggcgtatcggagaacatcattctcggccaattgccgaggatgggaaccggctgtttcgatttgttgttggacgccgataaatgtaaaatgggcataccgatacctcaagctcacagttccgatctcatgacgtccggcatgttcttcggctcggcggcgacgccgagcagcatgagccccggcggtgccatgactccttgggctcaggcgaatactccttatgtaggcagcgagtggtcaccacaaaatatgatgggtagcggtatgactccgggaggagcggcgttttctccctctgcagcatcggacgcttctggaatgtcgccagcttacggagcttggtctccgacgcctcaatctccggccatgtcaccttatatggcgtcacctcacggccaatcgccttcttacagtccttcgagtccagcattcatacccacctcgccgtctatgacgcccacatctcccggatattctccaagttctccaggttactcgcctaccagtcctaattacagtcctacgagtccgagttattcaccaacatctccaagttattcaccgacgtcgcctagttacagtccgacgtctcctagctattcgccgacgtcgccaagctacagtcctacgtctcctagttattcgccgacttctccgagctacagccctacgtcgccgagttattcgccgacatctccgagctacagtccgacgtctccgagttactcgccgacgtccccgagctacagtcctacatcgccgaattactcgcctacgtctccgaattacagcccgacgtcgccgagctattcgtcgacctcgcccagttactcgcctacgtctccgagttacagcccgagctcgcccagttactcgccgtcgtcgccgaggtacacccccgcctcacctaactactcgccgacgtcgcccagttactcgccgtcgtcgccgaggtac

SEQ ID NO: 63 - DNA, 531 bp, Phyllotreta striolata
atgaaagctaaaggagagttgaaagaatatgaagttatcgggcgcaaattgcccaccgataaagagaaaagccccccattgtataaaatgaggatattctctcccgacccgatcgtggctaaatcgcgtttctggtattttctgaggcaacttaggaaattcaagaagaccaccggagaaatcgtttcggtcaagccggtacccgaaaaaacccctaccaagattaagaactttggtatttggttgaggtacgattcccgttccggtacacataacatgtacagggaatacagggacctcagcgtgtctggagctgtaacggcttgctatagggatatgggggctcgtcatcgggctagagcacatgctattcagattattaaagtggaacaagtcaagtcgagcgacaccaggaggccacaagtcaaacaattccacgattcgaagattcggttcccgttgcccaaacgtatccaacacaagtctatgaaccgcttctctgtccgcaaacccagaacatacttcctgtaa

SEQ ID NO: 64 - DNA, 408 bp, Phyllotreta striolata
atgggtaaaataatgaaatccggtaaagtcgtattggtcctcggcggccgatacgccggaaagaaagcggtcgttatcaaaacctgcgatgatggcacgtctgacaaacaatacggacacgctttagtcgctggtattgacaggtatcccaggaaaatccacaagcgtatgggtaaaggcaaaatgcacaaaaggtccaagattaagcctttcatcaaaattttaaactacaatcacttgatgcctaccaggtactcagtagatttagcctctgacttaaaagtaacagctaaggacctgaaagatccgatgaagaggaagaaggctcgtttccagacccgtgtgaaattcgaagaaaggtacaagcagggcaagaacaagtggttcttccagaaattgcggttctag

SEQ ID NO: 65 - DNA, 405 bp, Phyllotreta striolata
atggctatacgaccagtttaccgacctaaaattgtcaagaagaggacgaagaagttcattaggcatcagtccgacaggtactcgaagctaaagcgcaactggcgtaaacccaagggtattgacaacagggtaaggaggagattcaagggccaatatttgatgccaaatattggttatggatcagcatctaaaactaggcacatgctacctacaggttttagaaaagtgttggtacacaacgttaaggaactagaggttctactcatgcaaaatcgcaaatactgcgctgaaatagcccacggtgtttcatcgaaaaaacgcaaagatatcgttgaacgtgctcaacaattgagcatcagagtcaccaatggacacgctagattacgtagccaagagaatgagtag

SEQ ID NO: 66 - DNA, 420 bp, Phyllotreta striolata
atggcgaacacgaacaccgatctaatcgaagaagacgccgccgacttgcagttccccaaagaattcgaaaatgcggaaactctacttatatcggaggtgcacatgttgttggagcacaggaaagagcaaaacgaatctctggaggacgagcaggaattttcggatgtgttcatgaaaactctaacctacacggatagatttaggaaattcaagaacaaagaaaccatatcggctgtgagaaatttattgatgcagacgaaaaaattgcacaagttcgaattggccgccatagcgaatttgtgcccggaaaccaccgaggaggcgaagtctctgataccgtcgctggagggccgtctggaggacgaggaactccaatcgattttggacgatattcaaacgaaacggagcatacaatattaa

SEQ ID NO: 67 - DNA, 2064 bp, Phyllotreta striolata
atgtcttataaaagaaaagcggagtcacaaatccccgctgaagagagcgatcaactgattatacgaccactaggagccggccaagaagtaggaagatcatgtattatgattgaatttaaaggaaaaaaaatcatgttggattgcggaatacatccagggctatctggtatggatgctttaccattcgtggacttaattgaagccgatgaaattgatatactcctaatatctcatttccatctcgatcacagcggagccttgccttggtttctattaaaaactagctttaagggccgatgttttatgacccatgcaaccaaagctatttacaggtggctgttgtctgattacattaaagttagtaatattgctacggaacaaatgttatatacagaggctgatttggaagccagtatggacaaaatcgaaacgataaatttccacgaagaaaaagatgtattgggtgttaaattttgggcttacaatgccggacacgtactgggagctgccatgtttatgatcgaaatagccggtgtcaaaatactctatactggagatttttctcgacaagaggataggcatttaatggccgcagaaattcccacgatacatccagatgtcttaataacggaatctacttatggtacacacattcatgagaaaagggaggatcgtgagagtcggtttactacattagtgcacgatatcgtaaatagaggtggaaggtgtctgataccggtatttgctttaggaagagcccaagaattgctgcttattttagacgaatattggagtcaacatccggaactccacgacatcccgatctattacgcttcctccttagcgaagaaatgcatggctgtctatcagacttacataaacgcgatgaacgacaaaatcaagcgacaaatagcgattaataatccgtttgtattcaaacatatatctaacttaaagggtatcgatcattttgatgatatcggcccgtgcgtagtgatggcatcccccggtatgatgcaaagcggtttgtccagggaactcttcgaaacttggtgtaccgatgcgaaaaatggagttatcatagcaggttactgtgtagaaggaacgctagctaaaacgattttatcagaaccagaagaaattacgactatggttgggcaaaagttgccgttaaaaatgtccgttgattacatatctttttctgctcacaccgattaccagcaaactagcgaattcatacgaatattgaaacctcctcatttagtgttagttcatggggaacaaaacgaaatgagtcgtttgaaagcggcccttcaaagggaatacgaagacgacagcaacactaccattaacatatacaacccgagaaacacgcattccgtcgaattgtacttcagaggcgagaaaacggcgaaagtaatgggacaattagccgtagatgaaccgcaaaccggcaaaactttgaacggtatattggtcaagaggaatttcaattatcacgttctatcgcccgacgatttaccgaaatataccgatttgaatataagccaaatattgcaaaggcagagtttgcattattccggcaacagcggagttttgagatacatgatatcgcaagtggccggtttattggaatcgatcgacggggagaagaaaatgcgcgccttcaatgcagtagatataataattgaaaataaaatcgtcgttttagagtgggtggcgaatccagtcaacgatatgtacgcagatgcgatagtagcggcgattttgcaagcggatttgttggaacaacccattaaaaacgtgacgacctccgttaaaatggacaggatgcatttcaaggagtgcctgatcgagatgctgcaggacatgtttggagaggattcggtgccgaagatattcaagggggaaaagttgtacgttgccgtgaacgataaacgggcggatatcgatcttaataatttggatgtgaaatgtcccgaagacgaaacgttccaacaaattgttcaaactgctgtgacgaaattgtaccagtcgttggctcctccacaatttgagtcatag

SEQ ID NO: 68 - DNA, 3531 bp, Phyllotreta striolata
atgaaagagcaaatgctgaaaggcgaggaattagagctccgtaaaaaaatcatcgaaaaatccaaggacggctcgctgaaagcgtccaacggcgacgccaccaaatcagcggcaccgaagaaacggggccgatgggatcagaccgtcgacgacgccgtggcgccgcaaaaaaagaaaaccctcagcgtatcgacgagcagcagcgccgcgacgcccgtttgggaaggagacaaaaccccggccgatatacgttgggacgagacgcccggtcacaaaggcagcgaaaccccgggggcgacgcccggccaatcgacgcgaatgtgggacgcgacgccgggcccggcgacgcccggccgagaaacgcccggccattcgggcgacaagagcacgtcgcgacgcaaccgttgggacgagacgcccaaaacggaacgcgagacgcccggccattcgagcggttgggcggagacgccgagaaccgatagaatcggcgccgatttgatacaggagacgccgacgccgggcgcttcgaaacgccgatcgcgctgggacgagacgccgtcggcgacgccctcgcaggcgatgacgcccggcgccatgacgcccagtaccccgcacggtaccccgcacgctacgcctactcacggtcacgccacgccgcttctcacgcccggcggttcgacgcccgtcggcgccaaggcgatgtcgatggcgacgccgacgccgggccacttggcgtcgatgacgcccgaacaactgcaggcctaccgatgggagcgcgagatcgacgaacgcaaccggccctattcggacgacgagttggacgccatgttcccgcccggttacaagatcctgccgccgcccgccggctacgtgcccatccggacgccggccaggaagctgacggcgacgccgacgccgctggcgggcggcacgccgaccggcttcttcatccagcaggaggacaagagcgccaagtacatggacaaccagcccaaagggcagaatctgccgttcatgaagcccgaggacgcgcagtacttcgacaagctgttggtcgacgtcgacgaggacgcgctcgcgcccgaagagcaaaaagaacggaagatcatgaagttgttgttgaagatcaagaacggcacgccgccgatgcgcaaagcggccctgcggcagatcaccgacaaagcgagagaattcggtgcgggaccgttgttcaatcaaatactgccgctgttgatgagcccgacgctcgaagatcaagagagacatctgttggtcaaagtcatcgataggattttgtacaagctggacgatttggtgaggccgtacgtgcacaaaatcctcgtcgtcatcgaaccgttgctgatcgacgaggattattacgcgcgcgtcgaaggtcgcgagatcatctcgaatctagccaaagcggccggattggcgacgatgatctccacgatgcgtcccgatatcgataacatcgacgagtacgtgcgtaacaccacggctagggctttcgccgtggtggcttcggcgttgggaatcccctcgttgttgccgttccttaaagccgtgtgtagatcgaagaaatcgtggcaagccaggcatacgggtattaagatcgttcaacaaatcgccatactcatgggttgcgcgattctgccgcatctgaaaagcttggtggaaatcatcgagcacggtctagtcgatgaacaacaaaaagtccgtacgattacggctttggggatagctgctttagcggaagccgctacgccgtacggtatcgaaagcttcgattccgtgttgaaaccgctctggaaaggtataaggactcacagaggcaaaggcctggcagcttttctcaaagccatcggttacctgatccctcttatggactccgaatacgccaactactacacgagagaagtgatgttgatattgatcagggaattccaatcgcccgacgaagagatgaagaagatcgtgctgaaggtggtgaagcaatgttgttcgaccgacggcgtcgaatcgcaatacatcaaagaggagatcctgccgcagttcttcaagcatttctggaaccaccggatggccttggacaggaggaactacaggcaattggtggatacgacggtggagatcgccaacaaagtgggcgcttcggagatcatcaatagaatagtggacgatttgaaggacgaaaacgaggcgtacagaaagatggtgatggagagcatcgaaaagatcatggggaatctcggcgcggccgatgtggattcgagattggaggagcaattgatcgatgggattttgtacgctttccaggaacagaccaccgaggacgtggtcatgttgaatggtttcggcacgatcgtcaatcaactaggcaaacgcgtcaaaccctacctgccacaaatttgcggtacgattttatggcgtttgaacaacaaatcggccaaagtgcgccagcaggcggccgatttgatatcgcgcatagccgtcgtgatgaagacctgccaggaggagaaactgatgggccatttgggcgtcgtgctctacgagtacttgggcgaggagtacccggaagttttgggttccattttgggcgccttaaaggccatcgtgaacgtcataggcatgaccaaaatgacgccgcccatcaaagatctcctgcccagactcacgccgatcctcaagaaccgacacgaaaaggtccaagagaactgcatcgatttggtgggtcgcatagccgatcgagggcccgaatacgtatcggcgcgcgaatggatgcgcatctgtttcgagctattagaactgctcaaagcccataaaaaagccattcgaagggccacggtgaacacgttcggttacatagccaaggccatcggacctcacgacgttttggccacgttgctgaataacctcaaagtacaagaacgtcagaatagggtgtgcacgaccgtcgccattgccatcgtagcggagacttgttcgccttttacggtactgccggcgttgatgaacgaatacagggtgcccgaattgaacgtgcaaaacggcgtgttgaaatcgttgtcgtttctgttcgaatacatcggcgaaatgggcaaggattacatttacgcggtggccccgttgctggaggacgctctcatggatagggatttggtacacaggcaaacggcgtgcgcggccatcaagcacatgtcccttggagtgtacggattcggttgcgaggacgctctggtgcatcttttgaactacgtgtggccgaacatattcgaaacatcgccgcatttggtgcaggcctttatggacgccatcgaaggtatgcgggtggccctgggaccggttaaaatactccaatacaccctgcagggattgttccatcccgctaggaaggtacgcgacgtgtactggaagatctacaattccttatacatcggaggccaggatgctctcgttgctggttatccgaggatcatgaacgatcctaaaaatcagtacgttagatacgagttggattatatattgtga

SEQ ID NO: 69 - DNA, 804 bp, Phyllotreta atra
atgtccaaagtaaatgaagttgctgatttatacaaacaattgaaatcagaatggaataccaaaaacccaaacttaagtaaatgcgagaaactcctgtctcagctgaagctggaattaaccaatttgatgtttctgccaacttcaacagcgaccgctacgaagcaggaattacttcttgcacgcgatgtcttagaaataggggtacaatggagtgtagcagccaacgatataacagcattcgaaagatatatggctcaattgaaatgctactatttcgattacaacaaccagcttcccgaatctgcgttcaagtatcaattactgggattgaatcttctgtttctattatcgcttaacagagtggctgaatttcacacagagttagaacttctaccggctgatcacatacagaacgatgtgtacataaggcatcctttatcgattgagcaatatttaatggaaggaagttacaataagatattccttgcgaaaggtaatgttcctgcagccagctacaccttttttatggacatactgcttgatacgattcgagttgagattgccgattgtttatcagtagcttatgaaaaaatatctgtaaaggattttacaagaatgctctatttgccgaatgaagaagcagccaagacttttgccaaaaaggctttccaaaataaggcttggaaaatagaccatgactacttctatttcattcccgaacagaaaactcatgaacctattccttcgaaggaactggcccagcaagcaattgaatacgctaaggaacttgaaatgatcgtttaa

SEQ ID NO: 70 - DNA, 432 bp, Phyllotreta atra
atgggtcggatgcacgcccccggtaaaggtatcgcccaatcggctttgccctacagaagcagtgtccccacgtggctcaaagtaacccccgaagaagtgaaagagcacatcttcaaattgggcaagaaaggcctcacgccgtcccaaatcggtgtcatccttagggattcctacggaggggcccaagtaagtttcgtctccggcaacaatatcctccgcatcatgaaggccatgggcctggcgcccgacctccccgaggacttgtactacctcatcaagaaggcagtggccatccgcaagcacttggagaggaacaggaaagacaaggacagcaagttccgcttgatcttggtagagtctcgtatccaccggctcgccaggtactacaagaccaaaacagtcctagcccccaactggaaatacgactcgaga

SEQ ID NO: 71 - DNA, 696 bp, Phyllotreta atra
atgttcaccactcgccaggttggcaaaaccttggtcaaccgtacccaaggtaccagaatcgcttctgaaggcctgaaattcagagtcttcgaagtttcgttagccgacttacagaacgataatgatgccgaaaggtctttcaggaagttccgtttgattgctgaagatgttcaaggtagaaacgtattaaccaatttccatggtatggacttgaccacggataagctgcgatcgatggttaagaaatggcagactcttattgaagcttcggctgatgtgaaaacttccgatgggtttttgcttagggtattttgtattggtttcaccaacaaagatcagcattcccaaaggaaaacgtgctatgcccagcatacacaagttagagctattcgcaagaagatggtggagatcatcacccgtgacatccagggctccgacatcaaagaagtagtcaacaagctgcttcccgacagcatagctaaggatatcgagaaggcctgccaaggtatttacccgcttcacgatgtctacattcgtaaggtgaaggtgctcaagaagccgcgtttcgacctttccaaattgttggaattgcacggcgacggcggcaaagggggcgccggtgaagctggcggcgaaggcggttctaaagtagataggccagagggatacgaaccacccgtacaagaaacggtgtaa

SEQ ID NO: 72 - DNA, 831 bp, Phyllotreta atra
atgagctacgttttgtgtccggaaaaacaagagccaggattttcgttcgaaaactgcaaaagaaatgccttactggaaagcaagggatttaccactcccaaggcgataaagacaggtactacaatcgtagggatagtttacaaagatggcgtgatacttggggctgatactcgagctacagaagacaccacagtggccgataaaaactgcgaaaaaatccactttttggctccaaatatgtattgttgtggtgcaggaactgccgcagacaccgaaatgaccactcaaatggtagcagcgcaactggaattgcacaagctctacacgaatagagaagctcgcgtagccacagctaaccagctcctgaagcaatatttattcagttaccaaggttacattggagctgcgctgatccttggaggcgtagacatcgaagggccccatttacacatgatctatcctcacggttctagcgtggatttgccttacgctactatgggatccggttcattagctgctatatcggtgtttgagttaggttggaagccggagatgggagaagaagagggcattcagctcgttagaaacgctatagctgctggtatctttaacgatttaggatctggttccaacgttgatgtatgtatcatacggaagggagtagtagactacagaaggacttatgatgaagccaataagaaaggcgtaagacaaggatcttataaattccccaggggtgctacggctgttttgtccactaaagtggttgatgtagaggaagtttctgtcactccaattgaagctgaaagaatggatgttgccgctttttaa

SEQ ID NO: 73 - DNA, 576 bp, Phyllotreta atra
atggcgcccgtagcgaagcctaaggaatctaaagacaaaagagatgtcaaggataaaaccaaaaatcatatgcgagaattgcatatccgcaaactatgccttaacatttgtgtaggagaatctggtgacagacttactcgtgctgctaaggtattagaacaactgactggtcaacaaccagttttctccaaagccagatacaccgtcaggtcttttggaattcgtagaaacgaaaaaattgctgtgcactgcacagtaagaggcgcgaaggccgaggaaatattagaaaggggcttaaaagtcagagaatacgaattgaggagggataacttctctatctctggtaacttcggtttcggtatccaagaacacattgatcttggaatcaagtacgaccctagcataggtatttacggtcttgatttctacgttgtattgggtcgccccggcttcaacgtagcccaccgaagagcgaagaagggaaaagttggtttctctcataggttgaccaaagaagacgctatgaagtggttccaacagaaatacgacggaataattttagcgagtaaaaaatag

SEQ ID NO: 74 - DNA, 459 bp, Phyllotreta atra
atggctttggtgattccagagaagtttcaacacattctccgtatcctcggtacgaatatcgatggaaaaaggaaagtgcaattcgccctcaccgccatcaagggtgtcggtaggcgttattccaatattgtcttgaaaaaggcagatgtgaatttagacaagagggccggagaatgttctgacgaagaagttgaaaagatcattaccattatgtctaatcctcgtcaatacaaaatccctgactggttcttgaacagaccgaaggacattattgatggtaaatacagtcagctgacttcttcaagtcttgactcgaagttgcgtgaggatttggaaaggctgaagaagatccgtgcgcacagaggtatgagacactactggggtctccgtgtgagaggtcaacacactaaggctaccggacgtcgtggacgtaccgttggtgtgtccaagaagaagtaa

SEQ ID NO: 75 - DNA, 876 bp, Phyllotreta atra
atgtcatccaatgcacaaaaagctcagcaattaatagctgaagctgagaagaaagtgtcgtcaaggggattcttcggttctcttttcggagggtccagtcgcatcgaggatgcagtggaatgttaccaaagggctgcgaatttgtttaaaatggcgaaaaattgggatgctgctggaaaagccttttgtgaagcagcaaacttgcattcgagaagcggggctcgtcatgatgctgcaactaattttgtggacgcggccaactgctataagaaagctgacatcagtgaggctgttaattgcttgctgaaagctatagaaatctatacagacatgggaaaatttacgatggcggccaagtaccatcaaaacattgccgaaatgtacgagactgatcccgttgacctagaacgagccgttcagcactacgaacaggctgcggactacttccgaggagaagagagcaattcatccgcaaacaaatgtcttctaaaagttggccagtacgcagcgcagctggaaaactacgaaaaagcaatacaaatctaccaagaagtagctttttcagctttagagagttccctgttaaaatacagtgctaaggagtacctgttcagggctgctctctgccatttatgtgtggatattctcaatgcccagcatgctgtagaaagttatattcaaaggtatcctgcatttcaagattcccgggaatataaattgttgaaaacgttgatggaacacattgaagagcagaatgttgatggatatacagatgctgtcaacgattatgattctatctctcgtttagatccttggtatactacaatcttgctgcgtattaaaaagcaacttaatgagagtcccgatttgcgttaa

SEQ ID NO: 76 - DNA, 372 bp, Phyllotreta atra
atgccgcctaaaactagtggaaaagcagcaaagaaagctgggaaagcccaaaagaacatttccaaagccgataaaaagaagaaaaggaggaggaaggaaagttacgcaatctacatttacaaagttttaaagcaagtacatcccgacaccggtatttccagtaaggcgatgagtattatgaacagtttcgtgaatgacatcttcgaaagaattgccgctgaagcttctcgtctggctcattataacaaacgatctactattactagtagagaaatccaaactgctgtgcgtctgctgcttcccggtgaacttgccaaacacgctgttagtgaaggaactaaggctgttaccaagtacaccagttcgaaataa

SEQ ID NO: 77 - DNA, 354 bp, Phyllotreta atra
atggctagtcatcaaagccacggtgtccaacagcttctagcagccgaaaagcgggctgcggacaaagtcacagaggccagaaaacgtaaagcgaggaggctgaagcaggccaaggaagaggcccaggacgagatcgaaaagtaccgcaaggaaagggagcgccagttccgcgagttcgaggccaagcacatgggctccaaggaggacgtcgctgcgaagatcgaccaggacaccaagcgaagaatcgaggatatgaacaaggctatccagagccagaaggaacccgtgattcgaaacatcttggaattggtgtacgacatcaagccggagatccacaagaactaccgtcaataa

SEQ ID NO: 78 - DNA, 381 bp, Phyllotreta atra
atggctggacgcggaaagggcggtaaggcgaagagcggcggaaaggcgaaatcgcgttcgtcgcgcgccggacttcaattcccggtcggacgtcttcatcgtctgttgcgcaaaggtcattacgccgagcgcgttggcgccggtgcacccgtctacctggctgccgtattggaatacctcgccgctgaagttctcgagttggctggcaacgctgcccgtgacaacaagaagacgcgaatcaatccgcgccacttgcagctggcggttcgtaacgacgaagagctcaataagctgatggctggcgtgacaatcgctcaaggcggtgtcctccctaacatcaacgccgttctgctgcctaagaagaccggcgcggaagcctaa

SEQ ID NO: 79 - DNA, 5688 bp, Phyllotreta atra
atggctgcaacagatagcaaggctccgcttagaactgtgaaaagagtgcagtttggaatacttagtcccgatgaaattcgtcggatgtcggttacagaagggggcatccgctttccagagaccatggaagcgggtcgccccaaaatctgcggtcttatggatccaaggcaaggcgtcatcgacagaagctcccgatgccagacatgtgctggcaacatgaccgaatgtccaggccacttcggacacgtcgatttagccaagccagtatttcacataggattcataacgaaaaccataaaaatcctcagatgcgtgtgctttttctgcagcaaactgctggttagccctaacaatcccaaaatcaaagaaattgtaatgaagacgaagggtcaaccgaggaaacgactcacgtttgtgtacgatctgtgcaaaggtaaaaacatttgcgaaggaggagacgagatggatgtcggcaaagaaggcgatgaaagtaaaaaggccggccacggaggatgcggtagatatcagccgaatatcaggagaatcggtctggatttaacggccgaatggaaacatgtcaacgaagacacgcaggagaaaaaaatcgctctatcggccgaaagggtttgggaaatactgaagcacatcactgacgaggaatgcttcattctcggcatggatcccaagtttgccaggcctgactggatgattgttacagtattgcctgtgccgcctttatccgtacgtcctgccgttgtgatgtacggatcggctagaaatcaagatgatttgactcacaaattagcggatatcattaaatctaataacgagctgcagaagaacgaggctgccggtgccgctgctcacattattactgagaatattaaaatgttacaattccatgtggccacgttggtcgataatgacatgcccggtatgcctagggcgatgcaaaaatctggaaaacctctaaaagccattaaagctcgcttgaagggcaaagaaggtaggatcagaggtaaccttatgggtaaacgtgtcgatttctcagctagaaccgtcattactcctgatccgaatttgcgaatcgatcaagttggcattcctagaagtattgcacaaaacatgacgtttccggaaatcgttacacctttcaattttgacaagatgttagagttggtccagagagggaattctcaatacccaggagccaaatatattattagagacaacggagaaagaatagatttgagatttcacccgaaaccttcagatttacatctgcaatggggttataaagttgaaaggcacatcagagacggcgatttggtgatattcaaccgacaacctactctccacaaaatgagtatgatgggtcacagggtgaaagttttgccttggtcgacgtttcgcatgaatttatcgtgcacatcgccttacaacgccgatttcgacggcgacgaaatgaatttacacgtaccccaaagcatggaaactagagccgaagtggaaaatatccacatcacacccagacagattatcacaccacaagccaacaaacccgtcatgggaattgtacaggatacattaacagcagttagaaaaatgaccaaacgagacgtgtttatagagaaggaacaaatgatgaatttgctaatgttcttacctatttgggatggtaaaatgccccgtccagctatcttaaagcccaagcctctgtggaccggtaaacaattattttctcttattattcccggaaacgtaaatatgatcagaacgcactctactcaccccgatgaggaagacgacggtccttataagtggatatctcctggagatacaaaagtaatggtagaacacggtgaattagtaatggggatattgtgtaagaaaactcttggtacatcagcaggttcactccttcatatttgtatattggagttgggtcacgaggtttgcggaagattttatggtaacatccaaacggtcatcaacaattggttgctacttgaaggtcatagtatcggtatcggtgatgcaattgccgatcctcagacgtacactgaaattcgaagagccattaagaaagccaaagaagatgtaatagaggttatacaaaaagctcacaacatggaactggaaccaacacccggtaatacgttgcgtcaaacattcgagaatcaagtaaacaggatattgaacgatgcccgtgacaaaactggaggttccgcgaagaaatctttaactgactacaataatttaaaagccatggtcgtatcgggttccaaaggttccaacatcaacatttcacaggttatcgcttgtgtgggccaacagaacgtcgaaggtaaacgaatcccgttcggcttcagaaaacgcacgttgccgcacttcatcaaagacgattacggtcccgagtcgaggggtttcgtagaaaattcgtatctcgccggtctgacgccctccgagttctatttccacgctatgggaggtcgtgagggtctcatcgataccgccgtaaaaaccgcagaaactggttacattcaacgtcgtctgatcaaagccatggagagcgttatggtgcactacgacggcaccgtaagaaattcggtaggtcaattgatccagttgaggtacggcgaagacggcctttgcggtgaaatggtcgagtttcaaactctatccacggtgaagctcagcaacaaagctttcgagaggaaattcagattcgatcccagcaacgaacgctatcttcgaagagtcttcaacgaagaggtaatcaagcaattgatgggttccggagaggtgatttccgagctcgaaagagaatgggaccaactgcaaaaggaccgagaagctcttcggcagattttccccagcggtgaatccaaagtcgtactgccttgtaatttacaaagaatgatttggaacgtacagaaaatcttccacatcaacaaaagagcaccgactgatttatcgccccttagggtcatacaaggcgtaagggagttgttgaaaaaatgcattatcgtggcaggagaggaccgtctgtcgaagcaggccaacgaaaacgctacgcttttattccaatgtctagtacgctccacgttgtgtactaaatgcgtttcggaggagttcaggcttagtacggaggcgttcgaatggttgattggagaaatagaaacccgtttccagcaagctcaagtgaatccgggcgaaatggtgggcgctcttgccgcccaatctttgggcgaacctgccacccaaatgacattgaacaccttccactttgctggtgtatcatcgaaaaacgtaactctcggtgtgccgagattgaaggaaattattaacatctcgaagaaacctaaggctccctctttaactgtatttttaactggtgtcgctgccagagatgccgaaaaagccaagaatgtgttatgtcgacttgagcacactactctacgtaaagttactgcgaacactgctatttattacgatcccgatccgcaaaatacagtcattccggaagatcaggaattcgttaacgtttattacgaaatgcccgatttcgatcccacccgcatatcaccgtggctgctgcgtatcgaattggacaggaaaagaatgaccgataaaaaactcactatggaacaaatcgctgaaaaaattaacgccggcttcggggacgatctcaattgcattttcaacgacgacaatgcggagaaattggtgctgcgcattcgaattatgaacagcgacgatgagaaattcggagaagacgaggatgtggacaaaatggacgatgacatgttcctcagatgcatcgaggctaatatgctgagcgacatgacactccaaggcatagaagccatttcaaaagtctacatgcatttaccacaaacagacgcgaagaaacgcatagtaattacggatactggcgaattcaaggctattgctgaatggttgctcgaaacagacggtaccagtatgatgaaagtcctgtcggagagagatgtagaccccgttagaacgttttcgaacgatatttgcgaaatattttcggtgttgggaatagaagctgttcgaaaatcagtcgaaaaagaaatgaacgccgtacttcaattctacggtctgtacgtaaactacagacatctcgctctgctttgcgatgttatgacggccaaaggacatttaatggccatcactcgtcacggtataaacagacaagatacgggagcgctgatgagatgctccttcgaggaaaccgtcgacgtactgatggacgcgtccagtcacgccgaagtcgatccgatgagaggcgtatcggagaacatcattctcggccaattgccgaggatgggaactggctgtttcgacttgttgttggacgccgacaaatgtaaaatgggcatacctatacctcaagctcacagttcggatctcatgacgtccggcatgttcttcggctcggcggcgacgccgagcagcatgagccccggcggtgctatgactccttgggctaatgccaatacgccttatgtaggcagtgagtggtcgccacaaaatatgatgggtagtggtatgacaccaggaggagcagcgttttctccctctgcggcatcagatgcttctggaatgtcaccagcttacggagcttggtctccgacgcctcaatctcctgctatgtctccttatatggcgtctcctcacggccaatcgccttcttacagtccttcgagtccggcattcatacccacctcgccgtctatgacgcccacatcgccgggatattctccaagttctccaggttattcgcctaccagtcctaattacagtccgacgagtcccagttactctccgacatctccgagttattcaccgacgtcgcctagttacagcccgacgtctcctagctattcgcctacttctccgagttacagtcctacatctcctagttactcaccgacgtcgccgagttatagtccaacgtctccgagttactcgcctacttctcctagttacagtcctacgtctccgagttactcgccgacgtcgccgagttatagtccaacatctccgaattattcgcctacatctccgaattattcgcctacatctccgagctattcgtcgacgtctcccagttactcgccgacatctccgagttacagccccagctcgcctagttactcaccatcgtctcctaggtacactccggcctcgcctaattattccccgacatcgccgagttactcaccatcgtcgccgcaatactcgtcggcctctccgagctactcgccgtcctcgccgaagtactcgccgacgagtccgagctactcgcccacgtcgccatcgttcgccggcggcagtccgcagtactcgccgacgtcgccgagttactcgccgaccagtccgagttactcgccgtcgagcccgcaacatacgccggccggtagctcgcggtactcgcccagttcgccgaattactcgcccagctcgccgagctactcgccgacttcgccgcagtattcgccgcgcagtacgaagtattcgccgacgtcgcctacgtatactccgacgagtccgagttactcgccggcgtcgcccgcgtactcgcctcagccgcctaggtattcgccttcgtcgcctagctactcgccgactagtcctggccaggacaacgattaa

SEQ ID NO: 80 - DNA, 477 bp, Phyllotreta atra
atgaaagctaaaggagagttgaaagagtatgaagtcatcgggcgcaagttgcccacagaaaaggagcctaaaactcctttatataaaatgaggatcttcgctcccgatcaaattgtggccaagtctcgtttctggtatttcttgagacagctaaagaagttcaagaaagctaccggtgagatcgtctcggtcaaacccattccagaaaaaactcccaccaaaatcaagaactttggtatttgggtgaggtacgactctcgttcaggaactcacaacatgtacagagaatatagagatttgagtgtttccggtgctgtaactcaatgctacagagatatgggagctagacatcgtgctagagctcattcaattcagattattaaagtggagcaagtcaaggcgagcgacaccaggaggccacatgtgaaacaattccacgattcgaggattcggttcccgttgcccaaacgtatccag

SEQ ID NO: 81 - DNA, 408 bp, Phyllotreta atra
atgggtaaaataatgaaatccggtaaagtcgtgttggtcctagggggccgatacgccggcaagaaagccgtagtgattaaaacctgcgacgatggcacgtctgacaaacaatacggacacgctctagtcgctggcatcgacaggtatcccaggaaaatccacaagcgtatgggcaaaggcaaaatgcacaaaaggtccaagattaagcctttcatcaaagttttaaactacaatcacttgatgcccactaggtattcggtagatttagcatccgatttaaaagtaaccgctaaggatttgaaagacccgatgaagaggaagaaggctcgtttccagacccgagtgaagttcgaggaaaggtacaagcagggcaagaacaagtggttcttccagaaattgcggttctag

SEQ ID NO: 82 - DNA, 405 bp, Phyllotreta atra
atggctataagaccagtttaccgacctaaaattgtcaagaagaggacgaagaagttcataaggcatcagtccgacaggtactcgaagctaaagcgtaactggcgtaaacccaagggtattgacaacagggtaagaaggagattcaagggccaatatttaatgccaaatattggttatggatcagcatctaaaactaggcacatgctacctacaggttttagaaaagtgttggtgcacaacgttaaggaactagaggttctactcatgcaaaatcgtaaatactgtgctgaaatagctcacggtgtgtcatctaaaaaacgcaaagatatcgttgagcgtgctcaacaattgagcattagagtcaccaatggacacgctagattacgtagccaagagaatgagtag

SEQ ID NO: 83 - DNA, 420 bp, Phyllotreta atra
atggcgaacacgaacaccgatctaatcgaagaagacgccgccgacttgcagttccccaaagagttcgaaaacgccgaaactctacttatatctgaagttcacatgctgctggagcataggaaagagcaaaacgaatctctggaggatgaacaagaattttcggatgtgttcatgaaaactctcacttacacggacagatttagaaaattcaagaacaaagaaaccatatcggctgtgaggaatttattgatgcaaacgaaaaagctgcacaagttcgaactggccgccatcgcgaatctgtgcccggaaaccaccgaggaggccaagtctctgataccatcgctggagggccgtttggaggacgaggaactccaatcgattttggacgatattcagacgaaaaggagcatacaatattaa

SEQ ID NO: 84 - DNA, 2064 bp, Phyllotreta atra
atgtcttataaaagaaaagcagattcgcaaatccccgctgaagagagtgatcaactaattatacgaccacttggagccggtcaagaagtaggacgatcatgcattatgattgaatttaaagggaaaaaaatcatgttggattgtgggatacatccaggcctatccggtatggatgctctaccattcgttgacttaattgaagccgatgaaatcgatatactacttatatcccattttcatctcgatcacagcggagcattgccttggtttctgttaaaaaccagcttcaaaggccgttgtttcatgacccatgctacaaaggctatatacaggtggctgttgtctgactacattaaagtcagtaatattgccacggaacaaatgctatacacagaagccgatttggaagccagcatggataaaatcgaaacgataaatttccacgaagaaaaagatgtactgggtgttaaattttgggcttacaacgccggacacgttctaggagctgctatgttcatgatcgaaatagctggtgttaaaatattgtatactggagatttttctcgacaagaagacaggcatttaatggctgcggaaatacccacgatacatccggacgtgctaataacggaatctacttatggtacacatattcacgagaaaagggaggatcgcgagactcgtttcactacattagtaaacgatatcgtaaatagaggtggaaggtgtcttataccagtatttgccttaggaagagcacaagaattgttgcttattttggatgaatattggagtcaacatcccgaactccacgacatcccgatctattacgcttcatcgttagcgaagaaatgcatggcagtgtatcagacttacataaacgctatgaatgacaaaatcaagcgacaaatagcgattaataatccgtttgtattcaaacatatatctaatttaaagggtattgatcattttgatgatattggaccgtgcgtggtgatggcctcccctggtatgatgcaaagcggtttgtccagagaactgttcgaaacttggtgtactgatgcgaaaaatggagttatcatagcaggttactgtgtcgaaggaacgttagctaaaacaattttatccgaaccagaagaaatcaccacaatggtggggcaaaagctacccttaaaaatgtctgttgattacatatcattttctgctcacactgattaccagcaaactagcgagtttatacgaatgttgaaacctcctcacctagtgttagttcatggtgaacaaaacgaaatgagtcgtttgaaagccgccctacagagggagtacgaagatgataacaccacctcaattaacatatacaatccgagaaacacgcattcagtcgaattgtacttcagaggcgagaaaacggcgaaggtgatgggccaactggccgtcgatgagccccaaactggcaaaactttgaacggtatattggtaaaaaggaattttaattaccacgtgctgtcgcccgatgatttaccgaaatataccgatctgaatataagccaaatattacaaagacaaagtttgcattactccggcaacagcggggttttgagatacatgatatcgcaagtagccggtttattggagtcgatagacggggagaagaaaatgcgtgccttcaatgcagtagatataataattgagaataaaatcgtcgttttagagtgggtggcgaatcccgtgaatgatatgtacgcagatgcgatagtggctgcgattttgcaagctgatttgttggaagtgcccattaaaaacgtaacgacatcggttaaaatggacaggatgcatttcaaggagtgcctgatcgagatgctgcaggacatgttcggagaagattcggtgcccaaaatattcaagggagaaaaattgtatgttgctgtgaatgataaacgagcggatattgatctcaataatttggatgtgaaatgtcccgaagacgaaaccttccagcaaatcgtccaaactgccgtgacgaaattgtaccagtcgttggctcctccacaattcgagtcctag

SEQ ID NO: 85 - DNA, 3990 bp, Phyllotreta atra
atggacaacattccgcgtacgcacgaagatatcgaggcgcaaatacgcgagatccagtcgaagaagaaagaggccgccccgtcggagtcgccgcccgagaaggtagcgaaactaggcgaagggggatacttcgacagcgacatatacgagggcaagggcaagtacgaagggtacgtaacttccatagcagccaacgatgaagtcgacgatgaggaggaagatgtggggtacacgcacaaaaggcccggactgggagcccccgtagcccttttaaacgacgtcgctcaaagcgataaagattacgatccgttcgcagaccgccgaagacctaccatagctgatagagaagatgagtataggcaaaaacgaagaagaatgattatttctccggaaagagtggatccgtttgctgacggtggaaaaacgcccgatgtccaagcgagaaattactcgaaaattatgaaagaacaaatgctgaaaggcgaagaattggagcttcgtaaaaaaatcatagaaaaatccaaggacggctctctcaaagcgaccaacggcgatgccaccaaatcagcggcgccgaagaaaaggggccgatgggatcagaccgtcgacgacgccgtggtgccccaaaaaaagaaaaccctcagcgtatctaccagcagtagcgccgcgacgcccgtttgggaaggagacaaaactccggcggacatccgttgggacgagacgccgggccacaagggcagcgaaacgccgggcgcgacgcccggccaatccacccgcatgtgggacgccacgccgggaccggcgacgccgggcagagagacgccgggccactcgggcgacaagagcacgtcgcggcgcaaccgttgggacgagacgcccaagaccgaacgcgaaacgccggggcattcgagcggttgggcggagacgcccagaaccgatcgaatcggcgccgatttgatacaggaaacgccgacgcccggtgcgtcgaaacgtcgctccaggtgggacgagacgccgtcggcgacgccttcgcaagccatgacgcccggcgccatgacgcctagtactccgcacggtaccccgcacgctactcctacgcacggtcacgccacgccgctgatgacgcccggcggctcgacgcccgtcggggcgaaggccatgtcgatggcgacgccgacgccgggccacttggcctccatgacgcccgaacaacttcaagcttatagatgggagagggagatagacgaacgcaatcggccctactccgatgacgaactggactccatgttcccgccgggttacaagatcctgccgccgccggccggttacgtgccaatcaggacgccggccaggaagttgacggccacgccgacgccgctggtgggcggcaccccgcagggattcttcatacagcaggaggataagagcgccaagtacatggacaaccagccgaaggggcagaatttgccgtttatgaagcccgaagatgcgcagtacttcgataagctgctggtggacgtcgacgaggacgcgctggctcccgaagaacaaaaggaacgtaaaatcatgaagttgttgttgaagatcaagaacggcacgccgccgatgcgcaaggcggctctacgacagatcaccgataaggcgagggagtttggagcggggccgttgttcaatcaaatcctgccgctgttgatgagccccacgctcgaagatcaagagcgacatttgttggtgaaggtgatcgataggattttgtacaagctggacgatctggtgaggccttacgttcacaaaatcttggtagtcatcgaaccgttgttaatcgatgaggattactacgcgcgagtagaaggtcgcgaaatcatttctaatctcgctaaagccgccggtttggcgacgatgatttccacaatgcgtccggatatagataacatagacgaatacgtacgtaatacaacggctagagctttcgctgtagtagcttcggcattgggtataccatctttactgccttttcttaaagccgtatgtagatcgaagaaatcgtggcaagctagacacaccggcataaaaatagtgcaacaaatcgccatactcatgggttgcgcgattctgcctcacttgaaaagcttggtggaaattatagagcacggtttggtcgatgaacagcaaaaagttcgtacgatcacggctttaggaatagctgctctggccgaagccgctacgccgtacggtatagaaagcttcgattccgtattgaaacccctgtggaagggtataagaactcacaggggtaaaggactggccgctttcctcaaagccatcggttacctgatacctctcatggattcggaatacgccaattactacacgagagaagtgatgttgattttgatcagggaattccaatcgcccgacgaggaaatgaagaaaatcgtgctcaaagtggtgaaacagtgttgttcgaccgacggcgtggaatcgcaatatataaaggaggagatcctgccgcagtttttcaagcatttctggaaccacaggatggccttggacagaaggaactacaggcaactggtggataccacggtggagattgcgaataaagttggagcttcggagattatcaacagaatagtggacgatttgaaagatgaaaacgaagcgtacaggaagatggtgatggagagtatagagaagatcatggggaatttgggagcggccgatgtggattcgagattggaggagcagctgatcgatgggattttgtacgctttccaggaacagaccaccgaagatgtggtgatgttgaacggtttcggtacgatcgttaaccaactgggcaagcgcgtcaaaccgtatttaccgcaaatttgcggtacgatcctgtggcgtttgaacaacaaatcggccaaagtgcgccaacaggcggccgatttgatctcccgcatagccgtggtgatgaagacctgccaggaggagaagctgatgggccatttgggcgtcgtgctctacgagtacctcggcgaggagtacccggaggtgttgggttccattttgggcgctctaaaggccatcgtaaacgtcataggcatgactaaaatgacgccgccgatcaaagatctcctgccgaggctcacgcctatactcaaaaacagacacgaaaaggtccaagagaattgcatcgatttagtgggacgcatcgccgatagggggcccgaatacgtatcggctcgcgaatggatgcgaatctgtttcgagttattagagctgctaaaagcccacaaaaaagccatacgaagggctacggtaaatacgttcggttacatagccaaagctataggtccgcacgacgtgttggccaccttgctgaataacctcaaagtacaagagcggcaaaatcgagtgtgtacgaccgtggctatagcgatcgtggcggaaacttgctcgcctttcacggtacttccggcgctgatgaacgaatacagggtgcccgaattgaacgtacaaaacggcgtgctgaaatcgttgtcttttctgttcgaatacataggggaaatgggtaaggattacatttacgcggtggcgccgttgctggaggacgctctgatggatagggatttggtgcacaggcaaacggcttgcgcagccatcaagcacatgtcgctgggagtgtacggtttcggttgcgaggacgccttggtgcatcttttgaactacgtgtggccgaatatattcgaaacgtcgccgcatttggtgcaggcctttatggacgccatcgagggcatgcgggtggccttggggccggttaaaatactgcaatatacgctgcaggggctgttccatcccgccaggaaggtgagggacgtgtactggaagatctacaattcgttgtacatcggaggccaggatgctctcgtggctggatatcctaggattatgaatgatcccaaaaatcagtacgtcagatacgaattggattatatattgtga

SEQ ID NO: 86 - DNA, 804 bp, Phyllotreta cruciferae
atgtccaaagtaaatgaagttgctgatttatacaaacaattgaaatcagaatggaatacaaaaaacccaaacttaagtaaatgcgagaaactcctgtctcaactgaagctcgaattaaccaatttgatgtttctgccaacttcaacagcgaccgctacgaagcaggaattacttcttgctcgcgatgtcttagaaataggggtacaatggagtgtagcagccaacgatataactgcattcgaaagatatatggctcaattgaaatgctactatttcgattacaacaaccagcttcccgaatctgcttttaagtatcaattactgggattgaatcttctgtttttattatcgcttaacagagtggctgaatttcatacagagttagaacttctaccggctgatcacatacagaacgacgtgtacataaggcatcctttatcgattgagcaatatttaatggaaggaagttacaataagatattccttgcgaaaggtaatgttcctgcagccagctacaccttttttatggacatactgcttgatacgattcgagttgaaattgcggattgtttatcagtagcctatgaaaaaatatctgtaaaggattttacaagaatgctctatttgccgaatgaagaagcagccaagacttttgccaaaaaggctttccaaaataaggcttggaaattagaccatgactacttctatttcattcccgaacagaaaactcatgaacctattccttcgaaagagctggcccagcaagctattgaatacgctaaggaacttgaaatgatcgtttaa

SEQ ID NO: 87 - DNA, 456 bp, Phyllotreta cruciferae
atgggtcggatgcacgcccccggtaaaggtatcgcccaatcggctttaccctacagaagaagtgtccccacatggctcaaggtaacccccgaagaagtgaaagagcacatcttcaaattgggcaagaaaggcctcacgccgtcccaaatcggtgtcatccttagggattcctacggagtggcccaagtgaggttcgtctccggcaacaagatcctccgcatcatgaaggccatgggactggcgcccgacctacccgaggacttgtactacctcatcaagaaggcagtggccatccgcaagcacttggagaggaacaggaaggacaaggacagcaagttccgcttgatcttggtggagtctcgtatccaccggctcgccaggtactacaagaccaagacagtcctagcccccaactggaaatacgaatcgagcacggcttcggctctggtcgcttaa

SEQ ID NO: 88 - DNA, 807 bp, Phyllotreta cruciferae
atggccgtcggtaaaaataagggtttgtcgaaaggaggcaaaaaaggtgttaaaaagaaggtaattgatcctttcacgaggaaagactggtacgatgtcaaggccccatcgatgttcaccactcgccaggttggcaaaaccttggtcaaccgtacccaaggtactagaatcgcttctgaaggcctgaaattcagagtcttcgaagtttcgttagccgacttacagaacgataatgatgccgaaaggtctttcaggaagttccgtttgattgctgaagatgttcaaggtagaaacgtattaaccaatttccatggtatggacttgaccacggataagctgcgatcaatggttaagaaatggcagactcttattgaagcttcagctgatgtgaaaacttccgatgggtttttgcttagggtattctgtattggtttcaccaacaaagatcagcattcccaaaggaaaacgtgctatgcccagcatacacaagttagagctattcgcaagaagatggtggagatcatcacccgtgacatccagggctccgacatcaaagaagtagtcaacaaactgcttcccgacagcatagctaaggatatcgagaaggcctgccaaggtatttacccgcttcacgatgtctacattcgtaaggtgaaggtgctcaagaagccgcgtttcgacctttccaaattgttggaattgcacggggatggcggcaaaggaggcgccggtgaagctggtggcgaaggcggttctaaagtagataggccagagggatacgaaccacccgtacaagaatcggtataa

SEQ ID NO: 89 - DNA, 831 bp, Phyllotreta cruciferae
atgagctacgttttgtgtccggaaaaacaagagccaggattttcgttcgaaaactgcaaaagaaatgccttactggaaagcaagggatttaccactcccaaggccataaagacaggtactacaatcgtagggatagtttacaaagatggtgtgatacttggtgctgatactcgagctacagaagataccacagtggccgataaaaactgcgaaaaaatccactttttggcaccaaacatgtattgttgtggtgcaggaactgccgcagacaccgaaatgaccactcaaatggtagcagcgcaactcgaattgcacaagctctacacgaatagagaagctcgcgtagcaacagctaaccagctcctgaagcaatatttattcagttaccaaggttacattggagctgcgctgatccttggaggcgtagacatcgaagggccccatttacacatgatctatcctcacggttctagtgtggatttgccttacgctacaatgggatccggttcattagctgctatatcagtgtttgaattaggttggaagccggagatgggagaagaagagggcattcagctcgttagaaacgctatagctgctggtatctttaacgatttaggatctggttccaacgttgatgtatgtatcatacggaaaggagtagtagattacagaaggacttacgatgaagctaacaagaaaggcgtaagacaaggatcttataaatttcccaggggtgctacggctgttttgtccactaaagtggttgatgtagaggaagtttctgtcactccaattgaagctgaaagaatggacgttgccgctttttaa

SEQ ID NO: 90 - DNA, 507 bp, Phyllotreta cruciferae
atgcgagaattgcatatccgcggactatgccttaacatttgtgtaggggaatctggtgacagacttactcgtgctgctaaggtattagaacaactgactggccaacaaccagttttctcaaaagccagatacaccgtcaggtcttttggaattcgtagaaacgaaaaaattgctgtgcactgcacagtaagaggcgcgaaggccgaggaaatattagaaaggggcttaaaagtcagagaatacgaattgaggagggataacttctctatctctggtaacttcggtttcggtatccaagaacacattgatcttggaatcaagtacgaccctagcataggtatttacggtcttgatttctacgttgtattgggtcgccctggcttcaacgtagcccaccgaagagcgaagaaaggaaaagttggtttctctcataggttaaccaaagaagacgctatgaagtggttccaacagaaatacgacggaataattttagcgagtaaaaaatag

SEQ ID NO: 91 - DNA, 459 bp, Phyllotreta cruciferae
atgtcgctcgttattccagaaaagtttcagcacattcttcgtgtcgtcggcacaaatattgatggtaacagaaaagtcatgtttgcattgactgccatcaagggtgtgggaagacgttatgccaatattgtattgaaaaaagctgatatcgatcttgataaacgtgctggagaatgctccgaagaagaagtcgaaaaaattgtcacaattatgacaaatccaagacaatacaaaattcctgactggttcctcaacagacagaaggatatcgttgacggaaaatattcacagctcactagttccaatttggattcgaaacttcgtgaggatttggagcgcatgaagaagattcgcgcccacagaggtcttcgtcattattggggtctccgtgtgcgtggtcaacacacaaagacaactggccgacgtggtcgtactgttggtgtgtccaagaagaagtaa

SEQ ID NO: 92 - DNA, 876 bp, Phyllotreta cruciferae
atgtcatccaatgcacaaaaagctcagcaattaatagctgaagctgagaagaaagtgtcgtcaaggggatttttcggatctcttttcggagggtccagtcgcattgaggatgcagtggaatgttaccaaagggctgcaaatttgtttaaaatggcgaaaaattgggatgctgctggaaaagccttttgtgaagcagcaaacttacattcgagaagtggggctcgtcatgatgctgcaactaattttgtggacgcggccaactgctataagaaagctgacatcagtgaggctgttaattgcttgctgaaagctatagaaatctatacagacatggggaaatttacgatggcggccaagtaccatcaaaacattgccgaaatgtacgagactgatcctgttgacctagaacgagccgttcagcactacgaacaggctgcggactacttccgaggagaagagagcaattcatctgcaaacaaatgtcttctaaaagttgcccagtacgcagcacagctcgaaaactacgaaaaagcaatacaaatctaccaagaagtagctttttcagctttagagagttccctgttaaaatacagtgctaaggagtacctatttagggctgctctctgccatttatgtgtggatattctcaatgcccagcatgctgtagaaagttatattcaaaggtatcctgcatttcaagattcccgggaatataaattgttgaaaaccttgatggaacacattgaagagcagaatgttgatggatatacagatgctgtcaatgattatgattctatctctcgtttagatccttggtatactacaatcttgctgcgtattaaaaagcaacttaatgagagtcccgatttacgttaa

SEQ ID NO: 93 - DNA, 372 bp, Phyllotreta cruciferae
atgccgccaaaaactagtggaaaagcagcgaagaaagctgggaaagcccaaaagaacatttccaaagctgataaaaagaagaaaaggaggaggaaggaaagttacgcaatctacatttacaaagttttaaagcaagtacatcccgacaccggtatttccagtaaggcgatgagtattatgaacagtttcgtaaatgacatcttcgaaagaattgccgctgaagcttctcgtctggctcattataacaaacgatctactattactagtagagaaattcaaactgctgtgcgtctgctgcttcccggtgaacttgccaaacacgctgttagtgaaggaactaaggctgttaccaagtacaccagttcgaaataa

SEQ ID NO: 94 - DNA, 354 bp, Phyllotreta cruciferae
atggctagtcatcaaagccacggtgtccaacaacttctggcagccgaaaagcgagctgctgacaaagttacagaggccagaaaacgtaaagcgaggaggctaaagcaggccaaggaagaggcccaagatgagatcgaaaagtaccgtaaagaaagggagcgccagttccgcgagttcgaggccaagcatatgggctccaaggaggatgtcgcttcgaagatcgaccaggacaccaagagaagaatcgaggatatgaacaaggctatccaaagtcagaaggaacccgtgattcgaaacatcttggaattggtctacgacatcaagccggagatccacaagaattaccgtcaataa

SEQ ID NO: 95 - DNA, 375 bp, Phyllotreta cruciferae
atgtctggtcgcggtaaaggtggtaaagttaagggaaaagcgaagtctcgttccaatcgtgccggattacaatttccggtaggtcgtattcacagattattgaggaaaggaaattacgctgaacgagttggagccggtgctccggtatacttagctgccgttatggaatatttggctgctgaagtattggaattggccggtaatgcagctcgtgacaacaagaaaacaagaataattccgagacatttgcaattggctattaggaatgacgaggaattgaataaattactttctggtgtaacaatcgcccagggaggtgttctgccgaacatccaagcagtgcttcttcctaagaagaccgaaaagaaggcttaa

SEQ ID NO: 96 - DNA, 4548 bp, Phyllotreta cruciferae
atgaaaaccataaaaatcctcagatgtgtgtgctttttctgcagcaaactgctggttagccctaacaatcccaaaatcaaagaaatcgtaatgaagacgaagggtcaaccgagaaaacgactcacctttgtttacgatttgtgcaaaggtaaaaacagttgcgaaggaggagacgagatggacgttggcaaagaaggcgatgaaagtaagaaggccggtcacggagggtgtggtagatatcagccgaatatcaggagaatcggactggatttaacggccgaatggaaacatgtcaacgaagacacgcaggagaaaaaaatcgctctatctgccgaaagggtttgggaaatactgaaacacatcaccgacgaggaatgcttcattctcggtatggatcccaagtttgccaggcctgactggatgattgttacagtattgcctgtacctcctttatctgtacgtcctgccgttgtgatgtacggatcggctagaaatcaagatgacttgactcacaaattagcggatatcattaaatctaataatgagctgcagaagaacgaagccgctggtgctgctgctcacattattactgagaatattaaaatgttacaattccatgtagccacattggtcgataatgacatgcccggtatgcctagggctatgcaaaaatctggaaaacctctaaaagccattaaagctcgcttgaagggcaaagaaggcaggattagaggtaatcttatgggtaaacgtgtggatttctcggctagaactgtcattactcctgatccgaatttgcgaatcgatcaagttggcattcctagaagcattgcgcaaaacatgacgtttccggaaatcgttacacctttcaatttcgacaagatgttagagttggttcagaggggcaattcccaatatccaggagccaaatatattattagagacaacggagaaagaatagatttaagatttcacccgaaaccttcagatttgcatctgcaatggggatataaagtggaaaggcacatcagagacggcgatttggtgatattcaaccgacaacccactctccacaaaatgagtatgatgggtcaccgagtcaaagttttgccttggtcgacatttcgcatgaatttatcatgcacatcgccttacaacgccgatttcgatggcgacgaaatgaatttacacgtaccccaaagcatggaaactagagctgaagtggaaaatatccacatcacacccagacagattatcactccacaagccaacaaacccgtcatgggaattgtacaggatacattaacagcagttagaaaaatgactaaacgagacgtattcatagagaaggaacaaatgatgaatttgctaatgttcttacctatttgggatggtaaaatgccccgtccagctatcctaaagcccaagcctctgtggaccggtaaacaattattttctcttattattcccggaaacgtaaatatgatcagaacgcactctactcaccccgatgacgaagacgacggtccttataagtggatatctcctggagatacaaaagtaatggtagaacacggtgaattagtaatgggaatattgtgtaagaaaactcttggtacatcagcaggttcactccttcatatttgtatattggagttgggtcatgaggtttgcggaagattttatggtaacatccaaacggtcatcaacaattggttgctactagaaggtcatagtatcggtatcggtgatgcaattgccgatcctcagacgtacactgaaattcgaagagccattaagaaagccaaagaagatgtaatagaggttatacaaaaagctcacaacatggaactggaacctactcccggtaatactttgcgtcaaacattcgagaatcaagtaaacaggatattgaacgatgcccgtgacaaaactggaggttctgcgaagaaatctttaactgactacaataatttaaaagccatggtcgtgtcgggttctaaaggatctaacatcaatatttcacaggttatcgcttgtgtaggccaacagaacgtcgaaggtaaacgaattccattcggcttcagaaaacgcacattgccgcacttcatcaaagacgattacggtcccgagtcgagaggtttcgtagaaaattcgtatctggccggtctgactccctccgagttctatttccacgctatgggaggtcgtgaaggtctcatcgataccgccgtaaaaactgcagaaactggttacattcaacgtcgtttgatcaaagctatggagagcgttatggtgcactacgacggcaccgtaagaaattccgtaggtcaattgatccagttgaggtacggcgaagacggcctttgcggtgagatggtcgagtttcaaactctatccacggtgaagctcagcaacaaagctttcgaaagaaaattcagattcgatcctagcaatgagcgctatcttcgaagggtttttaatgaagaggtaatcaagcaattgatgggttccggagaggtgatttccgagctcgaaagagaatgggaccaacttcaaaaggatcgagaagctcttcggcagattttccccagcggtgaatccaaagtcgtactaccttgcaatttacaaagaatgatttggaatgtacagaaaatcttccacatcaacaaaagagcaccaactgatttatcacctcttagggtcatacaaggcgtaagggaattgttgaaaaaatgcattattgtggcaggagaggatcgcttgtcgaagcaggctaacgaaaacgctacgcttttattccaatgtctagtacgctccacgttgtgtacaaaatgcgtttcggaggagtttagacttagtacggaggcattcgaatggttgataggagaaattgaaacccgtttccagcaagctcaagtgaatccgggcgaaatggtgggcgctctagccgcccaatctttgggtgaacctgccacccaaatgacattgaacaccttccactttgctggtgtatcatcgaaaaacgtaactctcggtgtgccgagattgaaggaaattattaacatctcgaagaaaccgaaggctccttctttaacggtatttttaactggtgtcgctgccagagacgccgaaaaagccaagaatgtgttgtgtcgacttgaacacactactttacgtaaagttactgcgaacactgctatttattatgatcccgatccacaaaatactgtcataccggaagatcaggaattcgttaacgtttactatgaaatgcctgatttcgatccaacccgtatatctccatggctgctacgtatcgaattggacaggaaaagaatgaccgataaaaaacttactatggaacaaatcgctgagaaaattaacgccggtttcggtgacgatctcaattgcattttcaacgacgacaatgcggaaaaattggtgctgcgcattcgaattatgaacagcgacgatgagaaattcggagaagacgaagacgtggacaaaatggacgatgacatgttcctcagatgcatcgaggctaatatgctgagtgacatgacactccaaggcatagaagccatttcaaaagtctacatgcatttaccacaaacagactcgaagaaacgcatagtaattacggatactggcgaattcaaggctattgctgaatggttgctcgaaacagacggtaccagtatgatgaaagtactgtcggaaagagatgtagaccccgttagaacgttttcgaacgatatttgcgaaatattttcggtgttgggaatagaagctgttcgaaaatcggtcgaaaaagaaatgaacgccgtacttcaattctacggtctgtacgtaaactacagacatctcgctctgctttgtgatgttatgacggccaaaggacatttaatggccattactcgtcacggtataaacagacaagatacgggagcgctgatgagatgctctttcgaggaaaccgtcgacgtactgatggacgcttccagtcacgccgaagtcgatccgatgagaggtgtatcggagaacatcattctcggccaattgccgaggatgggaactggctgtttcgacttgttgttggacgccgacaaatgtaaaatgggcataccgatacctcaagctcacagttcggatctcatgacgtccggcatgttcttcggctccgcggcaactccgagcagcatgagccccggcggtgctatgactccttgggctaacgccaatacgccttatgtaggcagtgagtggtcgccacaaaatatgatgggtagtggtatgactccaggaggagcggcgttttctccctctgcagcatcagatgcttctggaatgtcaccagcttacggagcttggtctccgacgcctcaatctcctcggagtcgacgagccgatccaaacggtcgcaggaggaagtcgagtaagaagacgatgaagaaaaagaggtggtggaagcagagcgcttctccgatttcgcatccatcatcgtcacgttgttcatgccgttgcaacagagaaagagagagaata

SEQ ID NO: 97 - DNA, 531 bp, Phyllotreta cruciferae
atgaaagctaaaggagagttgaaagaatatgaagttatcgggcgcaaattgcccaccgataaagagaaaagccccccattgtataaaatgaggatattctctcccgacccgatcgtggctaaatcgcgtttctggtattttctgagacaacttaggaaattcaagaagaccaccggagaaatcgtttcggtcaagctggtacccgaaaaaacccctactaagattaagaactttggtatatggttgaggtacgattcccgttccggtacgcataacatgtacagggaatacagagaccttagcgtttctggagctgtaacggcttgctatagagacatgggagctcgtcatcgggctagagcacatgctattcagattattaaagtggaacaagttaagtcgagcgacaccaggaggccacaagtgaaacaattccacgattcgaggattcggttcccgttgcccaaacgtatccaacataagtctatgaaccgcttctctgtccgcaaacccagaacatacttcttgtaa

SEQ ID NO: 98 - DNA, 408 bp, Phyllotreta cruciferae
atgggtaaaataatgaaatccggtaaagtcgtgttggtcctcgggggccgatacgccggcaagaaggccgtagtcattaaaacctgcgacgatggcacgtctgacaaacaatacggacacgctctagtcgctggtatagacaggtatcccaggaaaatccacaagcgtatgggcaaaggcaaaatgcacaaaaggtccaagattaagcctttcatcaaagttttaaactacaatcacttgatgcccactaggtactcggtagatttagcgtccgatttaaaagtaacggctaaggatttgaaagacccgatgaagaggaagaaggctcgtttccagactcgcgtcaagttcgaggaaaggtacaagcagggcaagaacaaatggttcttccagaaattgcggttctag

SEQ ID NO: 99 - DNA, 405 bp, Phyllotreta cruciferae
atggccattcgtccagtatataggccaactattatcaaaaagagaacgaaaaagttcatcagacatcaaagtgatcgctatgataaactcaagcgaaactggcgtaaaccgaaaggtattgataacagagttcgtaggcgcttcaagggtcaatatttgatgcccaacattggttacggaagtaacaaaaaaactcgtcacatgcttcccactggattccgaaaggttctcgtccacaatgtcaaggaacttgaagttcttatgatgcaaaatcgtaaattttgtgcagaaattgcacatgcagttagcagtaaaaaacgaaaagaaatcgttgaacgcgctcagcaactctcaattcgagtgacaaatgcaactgcgcgattacgttcagaggaaaacgaataa

SEQ ID NO: 100 - DNA, 420 bp, Phyllotreta cruciferae
atggcgaacacgaacaccgatctaatcgaagaagacgccgccgacttgcagttccccaaagaattcgaaaacgccgagactctacttatatccgaagtgcacatgctgctggagcacaggaaagagcaaaacgaatctctggaggatgagcaagaattttcggatgtgttcatgaaaactctgacttacacagacagatttagaaaattcaagaacaaagaaaccatatcggctgtgagaaatttattgatgcaaacgaagaagctgcacaagttcgaactggccgccatcgccaacctgtgcccggaaaccaccgaggaggccaagtctctgataccgtcgctggagggccgtttggaggacgaggaactccaatcgattttggacgatattcagacgaaaaggagcatacaatattaa

SEQ ID NO: 101 - DNA, 1959 bp, Phyllotreta cruciferae
atgattgaatttaaagggaaaaaaatcatgttggattgcgggatacatccaggtctatccggtatggatgctctaccattcgttgacttaattgaagccgatgaaatcgatatactccttatatctcattttcatctcgatcacagcggggctctgccttggtttctattaaaaaccagcttcaaaggccgttgtttcatgacccatgctacaaaggctatttacaggtggctgttgtctgattacattaaagtcagtaatattgccacggaacaaatgttatacacagaagccgatttggaagccagtatggataaaatcgaaacaataaatttccacgaagaaaaagatgtactgggtgttaaattttgggcttacaacgccggacatgtactaggagctgctatgttcatgatcgaaatagctggtgtcaaaatattgtatactggagatttttctcgacaagaagacaggcatttaatggctgcggaaatacccacgatacatccggacgtgttaataacggaatctacttatggtacgcatattcacgagaaaagggaggatcgtgagactcgtttcactacactagtaaacgatatcgtaaatagaggtggaaggtgtctcataccagtatttgcgttaggaagagcacaggaattgttgcttattttagatgaatattggagtcaacatcccgaactccacgacatcccgatctactacgcttcatcgttagcgaagaaatgcatggccgtgtatcagacttacataaacgccatgaatgacaaaatcaagcgacaaatagcgattaataacccgtttgtattcaaacatatatctaatttaaagggtatcgatcattttgatgatattggaccgtgcgtggtgatggcatcacccggtatgatgcaaagcggcttgtccagagaactgttcgaaacttggtgtactgatgcgaaaaatggagttatcatagcaggttactgcgtcgaaggaactttagctaaaacaatattatccgaaccagaagaaatcaccacaatggtggggcaaaagctacccttaaaaatgtctgttgattacatatcattttctgctcacactgattaccagcagaccagcgagtttatacgaatgttgaaacctcctcacctagtgttagttcatggcgaacaaaacgaaatgaatcgtttgaaagccgccctgcagagggagtacgaagatgataacaccacttcgattaacatatacaatccgagaaacacgcattcagtcgaattgtacttcaggggcgagaaaacggcgaaggtgatgggacagctggccgtcgacgagccccaaactggcaaaactttgaacggtatattggtaaaaaggaattttaattaccacgtgctgtcgcccgatgatttgccgaaatacaccgatttgaatataagccaaatattacaaagacaaagtttgcattactctggcaacagcggagttttgagatacatgatatcgcaagtagccggtttattggagtccatagacggggagaagaaaatgcgcgccttcaatgcagtagatataataatcgaaaataaaatcgtcgttttagagtgggtggcgaatcccgtgaatgatatgtacgcagatgcgatagtagctgcgattttgcaagcggatttgctggaagtgcccattaaaaacgtaacgacatcggtgaaaatggacaggatgcatttcaaggagtgcctgatcgagatgttgcaggacatgttcggagaggattcggtgcccaaaatattcaaaggggagaagttgtatgttgctgtgaatgacaaacgagcggatattgatctcaataatttggatgtgaaatgtcccgaagacgaaaccttccagcaaatcgttcaaactgccgtgacgaaattgtaccagtcgttggctcctccacaattcgaatcctag

SEQ ID NO: 102 - DNA, 3990 bp, Phyllotreta cruciferae
atggacaacattccgcgtacgcacgaagatatcgaggcgcaaatacgcgagatccagtcgaagaagaaagaggccgccccgtcggagtcgccgcccgagaaggtggccaaactaggcgaaggcggttacttcgacagcgacatatacgaaggcaagggcaagtacgaagggtacgtaacttcaatagcagccaacgatgaagtcgacgatgaggaagaagatgtcggttacacgcacaagaggcccggactgggagcccccgtagccctcctaaacgatgtcgctcaaagcgataaagattacgatccgttcgcagaccgccgaagacctaccatagctgatagagaagatgagtataggcaaaaaagaagaagaatgattatttctccggaaagagtggatccgtttgctgacggtggaaaaacgcccgacgtccaagcgagaaattactcgaaaattatgaaagaacaaatgctgaaaggcgaggaattggagcttcgtaaaaaaatcatagaaaaatccaaggacggctctctgaaagcgaccaatggcgatgccaccaaatcagcggcgccgaagaaaagaggccgatgggatcaaaccgtcgacgacgccgtggtaccgcaaaaaaagaaaaccctcagcgtatctaccagcagcagcgccgcgacgcccgtttgggaaggcgacaaaacgccggcggacatccgttgggacgaaacgccgggtcacaagggcagcgaaacgccgggagcgacgcccggccaatctacgcgcatgtgggacgccactccgggaccggcaacgccgggcagagaaacgcccggtcattccggcgacaagagcacgtcgcggcgcaaccgttgggacgagacgcccaaaaccgaacgcgaaacgccgggacattcgagcggttgggcggagacgccccgaaccgatagaatcggcgctgatctcatacaagaaacgccgacgcccggagcatcgaaacgtcgctccagatgggacgagacgccgtcggcgacgccttctcaagctatgacacccggcgccatgacgcccagtactcctcacggtacaccgcatgctactcctacgcacggtcacgccacgcctttaatgacgcccggtggctcaacgcctgtcggggcgaaggccatgtcgatggctactccgacgcccggccacttggcctccatgacgcccgaacaacttcaagcttatagatgggagcgagagatagacgaacgcaatcggccctactccgatgatgagctcgactccatgttcccgcccgggtacaaaatcctgccgcctcctgccggctacgtgcccatccggacgccggccaggaagctgacggccacgccgacgccgctagtgggcggcaccccgcaaggattcttcatacaacaggaggataagagcgccaagtatatggataatcaacccaaggggcagaatttgccgtttatgaagcccgaagatgcgcagtatttcgataaactcctggtggacgtcgacgaagatgcgctggctcccgaagagcaaaaggaacgtaaaatcatgaagttgttgttgaagatcaagaacggtacgccgccgatgcgtaaggcggctctacgacagatcaccgataaggcgagggaatttggagcggggccgttgttcaatcaaatcttgcctctattgatgagtcccacgctggaggaccaagagcgacatttattggtgaaagtaatcgataggattttgtacaagctggacgatctggttaggccttacgttcacaaaattctggtggtcatcgaaccgttgctaatcgatgaagattattacgcgcgtgtagaaggtcgcgaaatcatctctaatctcgccaaagcggccggattggcgacaatgatttccacaatgcgtcccgatatagataacatagacgaatacgtacgtaacaccacagctagagctttcgccgttgtagcttcagccctgggtataccatctttgctaccttttcttaaagccgtatgtagatcgaaaaaatcgtggcaagccagacacaccggcatcaaaatagtacaacaaatcgccatactcatgggttgcgcgattttgcctcacttgaaaagcttggtggaaattatagagcacggtttagtcgatgaacagcaaaaagttcgtacgatcacagctttggggatagctgcattagccgaagccgctacaccgtacggtatagaaagcttcgattcggtattaaaaccgctgtggaagggtataaggacgcacaggggcaaaggactggccgctttcctcaaagccatcggttacttgataccgcttatggattctgaatacgccaattactatacgagagaagtgatgttgattttgatcagggaattccaatcgcccgatgaggaaatgaagaaaatcgtgctcaaagttgtgaaacagtgttgttcgaccgacggtgtggaatcgcaatatatcaaggaggagatcctgccgcaatttttcaagcatttctggaaccacaggatggcattggatagaagaaattacaggcaattggtggacactacggtggagattgccaacaaagtgggagcttcggagattataaatcgaatagtggacgatttgaaagatgaaaacgaggcgtacaggaaaatggtgatggagagtatagagaagatcatggggaatctgggagcggccgatgtggattcgagattggaggagcagttaatcgatggaattttgtacgctttccaggagcagacgactgaggatgtggtgatgttgaatggtttcggtacgatcgtaaaccaactgggcaaacgcgtcaaaccgtatttaccgcaaatttgcggtacgatcctgtggcgtttgaacaacaaatccgccaaagtgcgccaacaggcggccgatttgatttcccgcatagccgtcgtgatgaagacctgccaggaggagaaactgatgggccatttgggcgtcgtgctctacgagtacctcggcgaggagtacccggaagtgttgggttccattttgggcgctttaaaagccatcgtaaacgtcataggtatgactaaaatgacgccgccgatcaaagatctcctgccgaggctcacgcctatactcaagaatagacacgaaaaggtccaagagaattgtatcgatttagtggggcgtatcgccgatagagggcccgagtacgtatcggcacgcgaatggatgcgaatctgtttcgagctattagaactgctaaaagcccacaaaaaggccatacgaagggccacggtaaatacgtttggttacatagccaaagctataggtcctcacgacgtgttggccaccttgctgaataacctcaaagtacaagaacggcaaaatcgcgtgtgtacgaccgtggctatagcgatcgtggcggaaacttgctcgccttttacggtacttccggcgttgatgaacgaatacagggtgcccgaattgaacgtgcaaaacggcgtactcaaatcgttgtcttttctgttcgaatacattggggaaatgggtaaggattacatttacgcggtggcgccgttgctggaggacgctctgatggatagggatttggtgcacaggcaaacggcttgcgctgccatcaagcatatgtcgctgggagtgtacgggttcggttgcgaggacgccctggtgcatcttttgaactacgtgtggccgaatatattcgaaacgtcgcctcatttggtgcaagcctttatggacgccatcgagggcatgagggtggccttggggccggttaaaattctacaatacacgctgcaggggttgtttcatcccgccaggaaggtgagagatgtgtactggaagatctacaattcgttgtacattggaggacaagatgctcttgtggctggatatcccaggatcatgaacgatcccaaaaatcagtacgtcagatacgaattggattatatattgtga

SEQ ID NO: 103 - DNA, 654 bp, Phyllotreta armoraciae
taaatgcgagaaactcctgtctcaactgaagctcgaattgaccaatttgatgtttctgccaacttcaacggcaacagctacaaagcaggaattacttttagctcgcgatgtcttagaaattggtgtacaatggagcgttgcagccaatgacataaccgcattcgaaagatatatggctcaattgaaatgctactattttgattacaacaaccagcttcctgagtctgcgtttaaatatcaattactaggattgaatcttctgtttttattgtcgcttaacagagtggcagaatttcacacagagttagaacttttaccagctgatcacatacagaacgatgtgtacataaggcatcctttatcaattgagcaatacctaatggaaggaagttacaataagatattccttgcgaaaggtaatgttcctgcagcaagctacaccttttttatggacatactgcttgatacgattcgagttgaaattgcggattgtttatcagtagcctatgaaaaaatatctgtaaaagattttacaagaatgctctatttgccgaatgaagaaacagctaagaattttgccaaaaaggcttttcaacacaaggcttggaaattggaccatgactacttctactttattcccgaacagaaaactca

SEQ ID NO: 104 - DNA, 313 bp, Phyllotreta armoraciae
tacagaagaagcgtccctacgtggctgaaagtaacccccgaagaagtgaaagagcacatcttcaaattgggcaagaagggcctcacgccgtcccaaatcggcgtcatcctgagggactcctacggagtggcccaggtaaggttcgtctccggcaacaagatcctccgcatcatgaaggccatgggactggcgcccgacctacccgaggacttgtactacctcatcaagaaagccgtggccattcgcaagcacttggagaggaacaggaaggacaaggacagcaagttccgtttgattttggtcgagtctcgta

SEQ ID NO: 105 - DNA, 622 bp, Phyllotreta armoraciae
attggtacgatgtcaaggccccatcgatgttcaccacgcgccaagttggcaagaccttggtcaaccgtacccaaggtactagaatcgcatctgaaggcctgaaattcagagtcttcgaagtttcattagccgacttacagaacgataatgatgccgaaaggtctttcaggaagttccgtttgattgctgaagatgttcaaggtagaaacgtattaaccaatttccatggtatggacttgaccacggataagttgagatcgatggtgaagaaatggcagactcttatcgaagcttctgctgatgtgaaaacttccgatgggtttttgcttagggtattttgtattggatttaccaacaaagatcagcattcccaaaggaaaacgtgctatgcccagcatacacaagttagagctattcgcaagaagatggtggaaatcatcacccgtgacatccagggttccgacatcaaagaagtagtcaacaaactgttgcccgacagcatagctaaggatatcgagaaggcctgccaaggtatttacccacttcacgatgtctacattcgtaaggtgaaggtactcaagaagccgcgtttcgacctttccaaattgttggaattgcacgg

SEQ ID NO: 106 - DNA, 677 bp, Phyllotreta armoraciae
cttactggaaagcaagggattttccacccccaaggcgataaagacaggtactacaatcgtagggattgtctacaaagatggtgtgatacttggggctgatactcgagctacagaagatactacggtggccgataaaaactgcgagaaaatccactttttggcaccaaatatgtattgttgtggtgcaggaactgccgcagacactgaaatgaccactcaaatggtagcagcgcaactggaattgcataagctctacacaaacagagaagcccgcgtagcaacagcaaatcagctcctgaagcaatacttattcagttaccaaggttacattggagctgctttgattcttggaggtgtagacatcgaagggccccatctgcatatgatttatcctcacggttccagtgtggatttgccttatgctaccatgggttccggttcattagctgctatatcagtgtttgagttaggctggaagcctgagatgggagaagaagagggcattcagctcgtaagaaacgctatagctgctggtatctttaacgatttaggatctggttctaacgttgatgtttgtatcatacgaaaaggagtagtagattacagaaggacctacgatgaagccaataagaaaggagtcagacaaggatcttacaaatttccaagaggtgctacag

SEQ ID NO: 107 - DNA, 429 bp, Phyllotreta armoraciae
tgccttaacatttgtgtaggagaatctggtgacagacttactcgtgctgctaaggtattagaacaactgactggtcaacagccagttttctccaaagccagatacaccgtcaggtcttttggaattcgtagaaacgaaaaaattgctgtacactgcacagtaagaggcgcgaaggccgaggaaatattagaaaggggcttaaaagtcagagaatacgaattgaggagggataacttctctatctctggtaacttcggttttggtatccaagaacacattgatcttggaatcaagtacgaccctagcataggtatttacggtcttgatttctacgttgtgttgggtcgccccggtttcaacgtagcccaccgaagagcgaagaagggaaaagttggtttctctcataggttaaccaaggaagacgctatg

SEQ ID NO: 108 - DNA, 315 bp, Phyllotreta armoraciae
aaagaaaagtgcaattcgccctcactgccattaaaggtgttggtagacgttattccaatattgtcttgaaaaaggcagatgtgaatttggacaagagggccggagaatgttccgacgaagaagttgaaaaaatcataactattatgtctaatcctcgtcaatataaaattcctgactggtttttgaacagacagaaggacattattgatggtaaatacagtcagctgacttcttcaagtcttgactcgaagttgcgtgaggatttggaaaggatgaagaagattcgtgcccacagaggtatgagacactactggg

SEQ ID NO: 109 - DNA, 681 bp, Phyllotreta armoraciae
ggggatttttcggatctcttttcggagggtccagtcgcattgaagatgcagtggaatgttaccaaagggctgcaaatttgtttaaaatggcgaaaaattgggatgctgctggaaaggctttttgtgaagcagcaaatttgcattcgagaagtggggctcgtcatgatgctgctactaattttgtagatgcagccaactgttataaaaaagctgacatcagtgaggctgttaattgcttgttgaaagctatagaaatctatacagacatgggaaaatttacgatggcagccaagtaccatcaaaacattgccgaaatgtacgagactgatcccgttgacttagaacgagccgttcagcactatgaacaggctgcggactatttccgaggagaagagagcaattcatccgcaaacaaatgtcttctaaaagttgcccagtacgcagcacagctcgaaaactatgaaaaagcaatacaaatctaccaagaagtagctttttcagctctagagagctctctgttaaaatacagtgctaaggagtacctgtttagggctgctctctgccatttatgtgtggatattctcaatgcccagcatgctgtagaaagttatattcaaaggtatccagcatttcaagattcccgagaatataaattgttgaaaacgttgatggaacacattg

SEQ ID NO: 110 - DNA, 223 bp, Phyllotreta armoraciae
agccgataaaaagaagaaaaggaggaggaaggaaagttacgcaatctacatttacaaagttttaaagcaagtacatcccgataccggtatttccagtaaggcgatgagtattatgaacagtttcgtgaatgacatcttcgaaagaattgccgctgaagcttctcgtctggctcattataacaaacgttctactattactagtagagaaatccaaactgctgtg

SEQ ID NO: 111 - DNA, 236 bp, Phyllotreta armoraciae
ttacagaggctagaaaacgcaaagccagaaggctaaagcaggccaaggaagaagcgcaggatgaaatcgagaagtaccgtaaagaaagggagcgtcaattccgcgaattcgaagccaagcacatgggctctaaagaggatgtagcttcgaagatcgaccaggacaccaagaggagaatcgaggacatgaacaaggctatccaaagtcagaaagaacccgtgatccaaaacatcttg

SEQ ID NO: 112 - DNA, 250 bp, Phyllotreta armoraciae
ccggattacaatttcccgtaggtcgtattcacagattattaaggaaaggaaattacgccgaaagagttggtgccggtgctccggtatacttagctgctgtaatggaatatttagccgctgaagtattggaattggcaggtaatgcagctcgtgataacaagaaaacaagaataattccaagacatttgcaattggcaattagaaacgacgaggaattgaataaattactttctggtgttacaattgctca

SEQ ID NO: 113 - DNA, 747 bp, Phyllotreta armoraciae
tagtcccgatgaaattcgtcggatgtcagttacagaagggggcatccgctttccagagaccatggaagcgggtcgccccaaaatttgcggtctcatggatccaagacagggcgtcatcgacagaagctcccgatgccagacctgtgccggtaacatgaccgaatgtccaggccacttcggccacgtagatttagccaaaccggtatttcacattggattcataacgaaaaccataaaaatcctcagatgtgtgtgctttttctgcagcaaattgctggtcagccctaacaatcctaaaatcaaagaaattgtaatgaagacaaagggtcaaccgagaaagcgactcacgttcgtgtatgatttgtgcaaaggtaaaaatatttgcgaaggtggagacgaaatggatgtcggtaaagagggcgatgaaagtaaaaaggccgggcacggaggatgcggtagatatcagccgaatatcaggagaataggtctggatttaacggccgaatggaaacacgtcaacgaagatacgcaagagaagaaaatcgctctatcggccgaaagagtttgggagatactgaaacacatcaccgacgaggaatgcttcattctcggtatggatcccaaattcgccagacccgactggatgattgttacagtattgcctgtgcctcctttgtccgtacgtcctgccgttgttatgtatggatcggctagaaatcaagacgatttgactcacaaattagcgga

SEQ ID NO: 114 - DNA, 403 bp, Phyllotreta armoraciae
accgataaagagaaaagccccccattgtataaaatgaggatattctctcccgacccgatcgtggctaaatcgcgattctggtattttctgagacaacttaggaaattcaagaagaccaccggagaaatcgtttcggtcaagccggtaccagaaaaaacccctaccaagatcaagaactttggtatttggctgaggtacgattcccgttccggtacacataacatgtacagggaatacagggaccttagcgtttctggagccgtaacggcttgttatagagatatgggagctcgtcatcgggctagagcacatgctattcagattattaaagtggaacaagttaagtcgagcgacaccaggaggccacaagtcaaacaattccacgattcaaagattcggttcc

SEQ ID NO: 115 - DNA, 259 bp, Phyllotreta armoraciae
aaagccgtcgtcattaaaacatgcgatgatggcacgtctgacaaacaatacggacatgctttagtcgctggtattgacaggtatcccaggaaaatccacaagcgtatgggtaaaggaaaaatgcacaaaaggtccaaaatcaagccttttatcagaattttaaactacaatcacttgatgcctaccaggtattcggtagatttagcttccgatttaaaagtgactcctaaagacctgaaagatccgatgaagaggaaga

SEQ ID NO: 116 - DNA, 269 bp, Phyllotreta armoraciae
agttcataaggcatcagtccgacaggtactcgaagctaaagcgcaactggcgtaaacccaagggtattgacaacaggttaagaaggagatccaagggccaatatttaatgccaaatattggttatggatcagcatctaaaactaggcacatgctacctacaggttttagaaaagtgttggtacacaacgttaaggaactagaggttctcctcctgcaaaatcgtaaatactgtgctgaaatcgcccatggtgtttcattgaaaaagcgc

SEQ ID NO: 117 - DNA, 280 bp, Phyllotreta armoraciae
attcgaaaacgctgaaactctgcttatatctgaagtgcacatgctgttggagcaccgtaaagagcaaaacgaatctctggaggacgaacaagaattttcggatgtgttcatgaaaactctgacttacacggacagatttagaaaattcaagaacaaagaaaccatatcggccgtgagaaatttattgatgcagacgaaaaaactccacaagttcgagctggcagccatagcgaatttgtgcccggagaccaccgaagaggcgaagtctctgataccttcg

SEQ ID NO: 118 - DNA, 650 bp, Phyllotreta armoraciae
tttctcgacaagaagacaggcatttgatggctgcagaaatacccacgatacatccagacgtattaataacggaatctacttatggtacacatattcatgagaaaagggaagatcgcgaaactcgttttacaacattagtgcacgatatcgtaaatagaggtggaaggtgtctcataccggtattcgccttaggaagagcccaggaattgctacttatcttagatgaatattggagtcaacatcccgaactccacgacatcccgatttattacgcttcatcgttagcgaagaaatgcatggccgtgtatcagacttacataaacgcgatgaacgacaaaatcaagcgacaaatagcgattaacaatccgtttgtattcaaacatatatctaacttgaagggtattgatcattttgatgatattggaccatgcgtagtgatggcatccccgggtatgatgcaaagcggtttgtccagagaactcttcgaaacctggtgtacggacgcaaagaatggagttatcatagcaggttactgcgtggaaggaacgttagccaaaacgatattatcagaaccagaagaaatcacgaccatggtcgggcaaaaattgcctttaaaaatgtccgttgattacatatcgttctctgctcac

SEQ ID NO: 119 - DNA, 686 bp, Phyllotreta armoraciae
aaagtggtgaagcaatgttgttcgaccgacggtgtcgaatcgcaatacataaaagaagaaatcctgccacagtttttcaagcatttctggaaccacaggatggccttggacaggaggaactacaggcaattggtcgatactacagtggagattgcgaacaaagtgggagcttcggagattatcaatagaatagtggacgatctgaaagacgaaaacgaggcgtatagaaagatggtgatggagagcatagagaagattatggggaatctcggagcagccgatgtggattccagattggaggagcaattgattgatgggattttgtacgcttttcaagagcaaactaccgaggatgtggtgatgttgaatggattcggtacgatcgtcaaccaattgggtaaacgtgtaaaaccttatttaccacaaatttgcggtactatcttatggcgtttgaacaacaaatcagccaaagtgcgtcaacaggctgcagatttgatatcccgcatagccgtagtaatgaaaacctgccaggaggagaagctaatgggccatttgggtgtggtcctctacgagtatctcggagaggagtacccggaagttttaggttccattttgggcgcgttaaaagccatcgtaaacgttataggcatgactaaaatgacgccgcctatcaaagatctcctgcc

SEQ ID NO: 120 - DNA, 613 bp, Psylliodes chrysocephala
gacatctacagctacagcaaccaagcaagaacttcttttagccagagatgtgttagagattggagttcaatggagtatagctgcaaatgatataacggcttttgaaagatatatggctcaactaaaatgctattattttgattacaataaccaacttccagaatctgcatttaaatatcaattattgggtttaaatttgctgtttttgttgtcccaaaatagagtagctgaatttcatacagaattggagttgttgccatctgatcatattcagaatgatgtttatataaggcatccattgtctattgagcaatatttaatggagggaagttataataaaatatttcttgcgaaaggcaatgtacctgcagctaactacaactttttcatggacatattgctggataccataagagttgaaattgcagattgcttgtcagtggcttatgaaaagatatcagtgaaggatattgctagaatgctgtacctgcctaatgaagaggcagcgaagaatttcgccaaaaaggctttccaaaataaggcttggaaattaaacaatgaatttttccattttattcctgaagaaaaaactcatgaaccgattccttccaaa

SEQ ID NO: 121 - DNA, 313 bp, Psylliodes chrysocephala
gaagaagtgtccctacatggctcaaagtaactcccgaggaagttaaggaccacattttcaagttaggaaagaaaggtttgaccccatcacaaattggtgtaatcctcagggattcctatggtgtagcccaagtaagatttgtttctggaaacaaaattttgcgaattatgaaggccatgggattagcccctgatctaccagaagatttgtactaccttatcaaaaaggctgtagctatccgcaagcatttggaaaggaataggaaggacaaggacagcaaattccgtttaattttggttgaatcacgtatcca

SEQ ID NO: 122 - DNA, 674 bp, Psylliodes chrysocephala
ggtagttgaccctttcacaagaaaagattggtacgatgttaaggccccatcgatgtttgccacccgacaagttggcaaaactttagttaatcgtacccaaggtaccaaaattgcatctgaaggtttgaaattcagagtttttgaagtatctttagccgatttacaaaatgataatgacgcggaaaggtctttcaggaagttccgtcttattgctgaagacgttcaaggtaggaatgttttaacaaatttccatggtatggatttgacaactgacaagttgaggtccatggtaaagaaatggcagactcttattgaggcatctgctgatgttaaaacgtctgatggttatttgcttagggtattctgcattggtttcaccaacaaagatcagctttcacaaaggaaaacgtgttatgcccagcatacacaagtcagagctatccgcaagaagatggtcgaaattatcacccgcgacatccaaggctcagacatcaaggaagtcgttaacaaactccttcccgacagcatagccaaggatattgagaaagcctgccagggcatctaccccctgcacgatgtgtacattcgcaaagtgaaggtactgaagaagccccgtttcgaactttccaaattgttggaattgcacggagacggcggtaaaggtggagctggtg

SEQ ID NO: 123 - DNA, 700 bp, Psylliodes chrysocephala
gaaatgctacactggaaagcaaaggattcgctgtaccgaaagcaataaaaactggtacaaccattgtaggaataacttataaagatggagttatacttggagctgatactcgcgcaacagaagataccactgttgccgacaagaactgcgaaaaaattcactatctggcacctaatatgtattgttgcggagctggaactgctgcagatactgaaatgacaactcagatggtagcagcacaattggagttgcacaaactttatacaaatagggaatctagagttgcaactgccaatcaacttttaaaacagtacttatttagttatcaaggttatataggagctgctttaattctaggaggagtggatatagaaggcccccatttgtacatgattcatcctcatggttctagtgtggatctaccatacggaaccatgggatctggatcattggctgctatagcagtatttgaattgggttggaagcctgatatggaggaagaagcaggagttcaacttgtaagagatgctatagctgctggtattttcaatgacttaggatctggttctaatgttgatatttgcgttattcgcaaaggatcagtagattacaagaggacatatgacgaggcaaataaaaaaggtgtgaaacaaggatcatacaaatatcccagaggtactactgcagttttgtccactaa

SEQ ID NO: 124 - DNA, 387 bp, Psylliodes chrysocephala
agggaattgcatatccgaaaactatgcctaaacatttgtgttggagaatctggtgacagacttactcgtgccgctaaggtattggaacagctcacaggccaacaaccagtattctcaaaagccagatacactgtcaggtcttttggaattcgtagaaatgaaaaaatagctgtacattgcacagtcagaggtgccaaggctgaagaaatcttggaaaggggtttaaaagttagagaatatgaattgagaagagataacttctcagcatctggtaattttggatttggtatccaagaacacattgatcttggtatcaaatatgaccctagtataggtatttatggtcttgacttctatgttgtattgggacgacctggattcaatgta

SEQ ID NO: 125 - DNA, 155 bp, Psylliodes chrysocephala
gggtgttggtagacgttattccaatattgtattgaaaaaggccgatgtcaacttagacaaacgtgctggagaatgttctgaagaggaagtagaaaaaattattacaattatgtctaaccctcgtcaatacaaaatccctgactggttcttgaaca

SEQ ID NO: 126 - DNA, 737 bp, Psylliodes chrysocephala
ttctctttttggtgggtcaagccgtattgaagatgcagtggaatgttaccaaagggctgcaaacctttttaaaatggctaaaagttgggattcagcaggaaaagctttttgtgaagcagcaaatttgcattcaagaagtggtgctcgtcacgatgctgctacaaattatgtagatgcagcaaattgttataaaaaggctgacattaatgagtctgtaaactgcttgttaaaagcaatagaaatctacacagatatgggtagattcacaatggcagcaaaacatcatcaaacaattgctgaaatgtatgagactgactctgtcgacctagagagggctgttcaacactatgaacaagcagcagactactttagaggtgaagaaagcaattcatctgctaataaatgccttctaaaagtcgcccagtatgctgcccaacttgaaaattatgaaaaagcaatacagatataccaagaagtggcttattcagcattggagagctctctattgaagtacagtgccaaagagtatctgtttagggctgccctttgtcacttatgtgtggatgttctcaatgcccagcatgccatagaaagttatatacaaaggtacccagctttccaagattcaagagaatacaagttattgaaatcactgatagaacacattgaagaacagaatgttgatggttacacagatgctgtgaaggactatgattctatttcgcgtctggatcaat

SEQ ID NO: 127 - DNA, 208 bp, Psylliodes chrysocephala
gaggaaggaaagttatgccatttacatttacaaagttttgaaacaagttcatcccgacactggaatttcgagtaaggctatgagcattatgaacagtttcgtaaacgatatcttcgaacgtattgctgctgaagcttctcgtcttgcacattacaataaacggtctacaataactagtagagaaatccaaactgccgttcgactatta

SEQ ID NO: 128 - DNA, 337 bp, Psylliodes chrysocephala
catcaaagccatggtgttcaacagcttttagcagctgaaaaacgcgctgcagacaaagttacagaggctagaaaacgcaaagctaggaggctaaagcaagctaaagaagaggctcaagatgaaatcgaaaaataccgtaaggaaagggaacgccaatttcgcgaattcgaggctaaacatatgggctctaaagaggatgttgccgcaaaaattgaagtagacacaaagcgtaggattgaagaaatgaataaggctatcataagtcaaaaggaaccagttatactagaaattttgaaactggtctatgatatcaagcctgaaatacacaagaactacc

SEQ ID NO: 129 - DNA, 181 bp, Psylliodes chrysocephala
ccagttggtcgtattcatcgtttattaagaaagggaaattatgcagaaagagtaggagctggtgcacctgtatatttagcagccgtaatggaatatttggctgctgaagttctagaattggctggtaatgccgctagagataataagaagactcgtattatccccaggcatttgcaattgg

SEQ ID NO: 130 - DNA, 660 bp, Psylliodes chrysocephala
ggaaactagagcggaagtagaaaatattcatattacacccagacagattattactccccaagctaataaacccgtcatgggtattgtacaggacacattgacagctgtcagaaaaatgaccaagagagatgtcttcattgaaaaggagcagatgatgaacttgttgatgttcttacctatttgggatggtaaaatgcctcgccctgcaatcttaaaaccaaagcccttatggactggaaaacaattgttctctcttatcattccgggaaacgtaaatatgataagaacacattcaactcatcctgatgaagaagacgatggtccgtacaagtggatatctccaggagatacaaaagtaatggtagagcacggcgaattagttatggggatcttatgcaaaaaaacactaggaacatctgcaggttctcttcttcacatttgtatgttggaattgggacacgaagtatgtggaagattctatggtaacatccaaacagtaatcaacaactggttgttactggaaggtcacagtattggtattggtgacaccatcgccgatcctcagacatatactgaaattcagagggcgatcaaaaaggccaaagaggatgtaatagaggttattcaaaaagctcataatatggaattggaacctacacc

SEQ ID NO: 131 - DNA, 355 bp, Psylliodes chrysocephala
gctaaatcacgtttttggtatttcttgaggcaacttaggaagtttaagaaaacaactggtgaaatcgtatccgttagactaatacctgaaaagactccagttaagataaagaatttcggtatatggttgaggtatgactcccggtctggaacacacaacatgtacagggaatacagagaccttagcgtctctggagctgtaacagcttgctatagggatatgggcgcccgccacagagctagagctcatgctattcaaatcatcaaagtggaacaggttaaagcatctgacaccaggaggccacaagttaaacaattccatgattcaaaaattcgtttcccactacccaaacgta

SEQ ID NO: 132 - DNA, 218 bp, Psylliodes chrysocephala
aaacagtatggacatgccttagttgctggtattgataggtatccaaggaaaatccacaaacgtatgggtaaaggcaaaatgcacaagaggtctaagatcaagcccttcatcaaggtattaaactacaaccacctgatgcctaccagatattctgtagacttagcatcagatttaaaagtaactccaaaagaacttaaagacccaatgaagaggaagaa

SEQ ID NO: 133 - DNA, 275 bp, Psylliodes chrysocephala
atggaaaactaaagcgcaactggcgtaaaccaaagggtattgacaatagagtaaggaggagattcaagggacaatatttgatgccaaatattggttatggatcggccgctaaaactagacacatgttgcctacaggttttaggaaagtgttggttcataatgtgaaggaactagaagttcttctcatgcaaaatcgtaagtactgtgcagaaattgcccatggggtttcatccaaaaaacgtaaagacattgttgaacgtgctcaacaattaagc

SEQ ID NO: 134 - DNA, 285 bp, Psylliodes chrysocephala
atttgaaaatgccgaaacgttgcttatttccgaggtccatatgctgttagagcatagaaaggatcaaaatgaatctgcagaagatgaacaagaattttcggatgtctttatgaaaaccttgacgtatactgatagatttcgcaaatttaaaaacaaggaaaccatatcggctgttagaaatttattaatgcaaaccaaaaaattacacaaatttgaattggccgctattgcgaatttgtgcccagaaaccactgaagaggcaaaatctctaattccttccctgga

SEQ ID NO: 135 - DNA, 668 bp, Psylliodes chrysocephala
cagagtctacttatggcacccatattcatgaaaaacgtgaagatcgtgaatcccgtttcacctcattggttaatgaaattgtaaatagaggtggtagatgtctaattccagtatttgcccttggaagagcacaggaattattgctcatattagatgaatattggagcctgcatccagaacttcatgatattccaatttactatgcttcttctttagcaaagaaatgtatggccgtgtaccaaacatacataaatgcaatgaatgataaaataaaaaggcaaattgctgtaaataatccatttgtgttcaaacatatttctaatttaaagggaatcgatcatttcgaagatatagggccctgtgtggtgatggcatctccgggtatgatgcaaagcgggttgtccagagaacttttcgaaacttggtgtacggatgtaaaaaatggcgttataatagcgggttattgtgtagaaggtactttagctaaaacgatattatcagaacctgaagaaattacaacaatggttggacaaaaactgcctctaaagatgtcagtcgattatatatcgttttctgcgcatactgactatcagcagacgagcgaatttattaggctattaaaaccgcctcatgtagtcttggttcacggcgaacaaaacgagatgaat

SEQ ID NO: 136 - DNA, 760 bp, Psylliodes chrysocephala
gcttagtccagaggaacaaaaagaacggaaaataatgaaactgttgctgaaaatcaagaacggcactcctcctatgcgtaaagcagctttaaggcagattacagataaggcgagagaattcggtgccggaccgttattcaaccagattttaccgctattgatgagtcctaccctcgaggatcaagaacggcatttgttggtgaaagtaatcgataggattctgtataaattggatgatctggtcaggccttatgtgcacaaaattctcgttgttattgaacccctgcttatcgacgaagattactacgctcgtgtggaaggtcgtgagatcatatccaacctcgccaaagccgccggtcttgccactatgatctctacgatgagacctgatattgacaacatcgacgagtacgtcagaaatacaactgcgagagctttcgccgttgtagcttccgctttgggaattccttcactgttgcctttcttaaaggccgtttgtaggtcaaagaaatcttggcaggccaggcatactggtattaagatcgttcagcagatcgctatccttatgggttgtgcaattttgccacatttgaaatctttggtggagattattgagcatggattggtggatgagcaacaaaaagtcaggaccattaccgctttgggtatcgccgcccttgctgaagcagctaccccttacggtattgaaagtttcgactccgtactgaaacccctctggaaaggtatcagaactcatcgc

SEQ ID NO: 137 - DNA, 244 bp, Phyllotreta nemorum
cttgcgaaaggtaatgttcctgcagcaagctacaccttttttatggatatactgcttgatacgattagagttgaaattgccgattgtttatcagttgcctatgaaaaaatatctgtgaaagattttactagaatgctctatttgccgaatgaagaaacggctaagaattttgccaaaaaggcgtttcaaaacaaggcctggaaattagaccacgactacttctactttattcccgagcagaaga

SEQ ID NO: 138 - DNA, 266 bp, Phyllotreta nemorum
gagcacatcttcaaattgggcaagaaaggcctcacgccgtcccaaatcggtgtcatcctgagggattcctacggagtggcccaagtaaggttcgtgtccggcaacaagatcctccgcatcatgaaggccatgggactggcgcccgacctacccgaggacttgtactacctcatcaagaaggccgtggccattcgcaagcacttggagaggaacaggaaggacaaggacagcaagtttcgcttgattttggtagagtctcgtatcca

SEQ ID NO: 139 - DNA, 612 bp, Phyllotreta nemorum
gaaggattggtacgatgtcaaggcaccgtcgatgttcaccacgcgccaagttggcaagaccttggtcaaccgtacccaaggtaccagaatcgcatctgaaggcctgaaattcagagtcttcgaagtttcattagccgacttacagaacgataatgacgccgaaaggtctttcaggaaattccgtttgattgctgaagatgttcaaggtaggaacgtattaaccaatttccatggtatggacttgaccacagataagttgcgatcgatggtcaagaaatggcagactcttatcgaagcttctgctgatgtgaaaacatccgatgggtttttgcttagggtattttgtattggtttcaccaacaaagatcagcattcccaaaggaaaacgtgctatgcccagcatacacaagttagagctattcgcaagaagatggtggaaatcatcacccgtgacatccagggttccgatatcaaggaagtagtcaacaaactgttgcccgacagcatagctaaggatatcgagaaggcctgccaaggtatttacccgcttcacgacgtctacattcgtaaggtgaaggtactcaagaagccgcgtttcgacctttccaaatt

SEQ ID NO: 140 - DNA, 253 bp, Phyllotreta nemorum
cgaaatgaccactcaaatggtagcagcgcaactggaactgcataagctctacacaaacagagaagctcgcgtagcgacagccaaccagctcctgaagcaatatttattcagctaccaaggctacattggagccgctctcattctcgggggcgtagacatcgaagggccccatttacatatgatttaccctcacggttccagcgtggacttgccttacgccaccatgggttccggttctttagccgctatatca

SEQ ID NO: 141 - DNA, 355 bp, Phyllotreta nemorum
tcaacaaccagttttctccaaagccagatacaccgtcaggtcttttggaattcgtagaaacgaaaaaattgctgttcactgcacagtaagaggcgcgaaggccgaggaaatattagaaaggggcttaaaagtcagagaatacgaattgaggagggataacttctctatctctggtaacttcggtttcggtatccaagaacacattgatcttggaatcaagtacgaccctagcataggtatttacggtcttgatttctacgttgtgttggggcgccccggttttaacgtagcccaccgaagagcgaagaagggaaaagttggtttctctcataggctaaccaaggaagacgctatg

SEQ ID NO: 142 - DNA, 209 bp, Phyllotreta nemorum
cgatggaaaaaggaaagtgcaattcgccctcactgccattaagggtgttggtagacgttattccaatattgtcttgaaaaaggcagatgtgaacttggacaaaagggctggagaatgttccgacgaagaagttgaaaaaatcattactattatgtctaatcctcgtcaatacaaaattcctgactggttcttgaacagacaaaaggata

SEQ ID NO: 143 - DNA, 467 bp, Phyllotreta nemorum
aaggggatttttcggatctctcttcggagggtccaatcgcattgaagatgcagtggaatgttaccaaagggctgcgaatttgtttaaaatggcgaaaaactgggatgctgctggtaaggccttttgtgaagcagcaaacttgcattcgagaagcggggcccgtcatgattctgctactaatttcgtagacgcagccaactgctacaagaaagctgacgtcagtgaggctgttaattgcttgctgaaagctatagaaatctatacagacatgggaaaatttacgatggcagccaagtaccatcaaaacattgccgaaatgtacgagactgatccagttgacctagaacgagccgttcagcactacgaacaggccgcggactacttccgaggggaagagagcaattcgtccgcaaacaaatgtcttctgaaagttgcccagtacgcagcgcagctcgaaaactacgaaa

SEQ ID NO: 144 - DNA, 245 bp, Phyllotreta nemorum
ggtatttccagtaaggcgatgagtattatgaacagtttcgtgaatgacatcttcgaaagaattgccgccgaagcttctcgtctggctcattacaacaaacgttctactataactagtagagaaatccaaactgctgtgcgtctgctacttcccggtgaacttgccaaacacgccgttagtgaaggaactaaggctgttaccaagtacaccagctccaaataattcgcctacaacaaatacgttgg

SEQ ID NO: 145 - DNA, 198 bp, Phyllotreta nemorum
agttacagaggccagaaaacgcaaagccaggaggctgaagcaggccaaggaagaggcccaagatgagatcgagaagtaccgtaaagaaagggaacgccaattccgcgaattcgaagccaagcatatgggctctaaagaggatgtcgcttcgaagatcgagcaggacaccaagaggagaatcgaggatatgaacaaggc

SEQ ID NO: 146 - DNA, 181 bp, Phyllotreta nemorum
cctgtaggtcgtattcacagattgttgagaaaaggaaattatgctgaaagagttggtgccggtgctccggtatacttggctgctgttatggaatatttagccgccgaagtattggaattggccggtaatgcagcccgtgacaacaagaaaacaagaataattccaagacatttgcaattgg

SEQ ID NO: 147 - DNA, 650 bp, Phyllotreta nemorum
agtgtttcacatcggattcataacgaaaaccataaaaatcctcagatgtgtgtgcttcttctgcagcaagttgctggtcagccctaacaatcctaaaatcaaagaaatcgtaatgaagacgaaaggtcaaccgagaaaacgactcacgttcgtgtacgatttgtgcaagggtaaaaacatttgcgaaggtggggacgagatggatgtgggtaaagaaggcgatgaaagtaagaaggccggacacggaggatgcggtagatatcagccgaacatcaggagaatcggtctggatttaacggccgaatggaagcatgtcaacgaagacacgcaagagaagaaaatcgctctatcggccgaaagagtttgggaaatactgaaacacatcactgacgaggagtgcttcattctcggtatggatcccaaatttgccagacctgactggatgattgttacagtattgcctgtacctcctttatccgtacgtcctgctgtagttatgtacggatcagctagaaatcaagatgacttgactcacaaattagcagatatcattaaatctaacaatgagctgcagaagaatgaagctgctggtgctgctgctcacattatcactgaaaatattaaaatgttacaattccatgtagccacat

SEQ ID NO: 148 - DNA, 283 bp, Phyllotreta nemorum
cgcttcctttccgttaaaaaaaccgtagccatgaaagctaaaggagagttgaaagaatatgaagttatcgggcgcaaattgcccaccgacaaagagaaaagccccccattgtataaaatgaggatattctctcccgacccgatcgtggctaaatcgcgattctggtattttctgagacagcttaggaaattcaagaagaccaccggagaaatcgtttcggtcaagccggtacccgaaaaaacccctaccaaaatcaagaactttggtatttggttgaggtacg

SEQ ID NO: 149 - DNA, 259 bp, Phyllotreta nemorum
aaagccgtcgtcattaaaacatacgatgatggcacgtctgacaaacaatacggacatgctttagtcgctggtattgacaggtatcccaggaaaatccacaagcgtatgggtaaaggcaaaatgcacaaaaggtccaaaatcaagcctttcatcagaattttaaactacaatcacttgatgcccaccaggtattcggtagatttagcctccgatttaaaagtgactcctaaagacctcaaagatccgatgaagaggaaga

SEQ ID NO: 150 - DNA, 258 bp, Phyllotreta nemorum
agttcataaggcatcagtccgacaggtactcgaagctaaagcgaaactggcgtaaacccaagggtattgacaacagggtaagaaggagattcaagggccaatatttaatgccaaatattggttatggatcagcatctaaaactaggcacatgctacctacaggttttagaaaagtgttggtacacaacgtcaaggaactagaggttctactcatgcaaaatcgtaaatactgtgctgaaatagcccatggtgtttcat

SEQ ID NO: 151 - DNA, 284 bp, Phyllotreta nemorum
ccccaaagaattcgaaaacgccgaaactctgctcatatccgaagttcacatgctgctagagcacaggaaagagcaaaacgaatctctggaggacgaacaggaattttcggatgtgttcatgaaaactctaacttacacggacagatttagaaaattcaagaacaaagaaaccatatcggccgtcaggaatttattgatgcagacgaaaaaactccacaaattcgagctggccgccatagcgaacttgtgtccggagaccaccgaggaggcgaagtctctgatac

SEQ ID NO: 152 - DNA, 721 bp, Phyllotreta nemorum
ttttctgctcacaccgattaccagcagaccagcgaattcatacggattctgaaacctcctcaccttgtgttggttcacggggaacaaaacgaaatgaaccgtttgaaagcggcccttcaaagggaatacgaagacgatagcaacacaaccattaacatatacaacccgaggaacacgcattccgtcgagttgtacttcagaggcgagaaaacggccaaggtaatgggacagctagcagtcgatgaaccgaaaacagggaaaactttgaacggcatattggttaaaaggaatttcaattatcacgttttatctcctgacgatttacccaaatataccgatttgaatataagtcaaatactgcaaagacagagtctgcactattccggcaacagcggagttttgagatacatgatatcccaagtagccggcctgttggaatccatagacggggagaagaaaatgcgagccttcaatgcagtagatattataatcgaaaataaaattgtcattttagagtgggtggcgaatcccgtaaacgatatgtacgcagatgcgatagtagcggcgattttacaagctgatttattggaagcgcccattaaaaacgtgacgacctccgttaaaatggacaggatgcacttcaaggagtgcctcatcgagatgttgcaggacatgttcggggaagattcggtgccgaagatattcaagggggaaaagttgt

SEQ ID NO: 153 - DNA, 734 bp, Phyllotreta nemorum
tgttggtgaaagtcatcgataggattttgtacaagctagacgatttggtcagaccgtacgtgcacaaaattctcgtcgtaatcgaaccgttgttgatcgatgaggattattacgcgcgcgtagaaggccgtgaaatcatttcgaatttagccaaggcagctggattagcaactatgatttccacgatgcgtccggatatcgataacattgatgaatacgtgcgtaatacgacagctagagctttcgctgtggtcgcttcggctttggggattccctcgttgttgccttttctcaaagccgtatgtagatcgaagaaatcgtggcaggccaggcacaccggcatcaaaatcgtacaacaaatcgctatactaatgggttgcgcgattttgcctcacttgaaaagcttggtggagataatagaacacgggctggtcgatgagcaacaaaaggttcgtaccattacggctctggggatagccgctttggccgaagccgctaccccgtacggcatagaaagcttcgattccgtgttgaaaccgctttggaaaggtataaggactcacagaggcaaaggactggccgctttcctcaaagctatcggttacttgataccgcttatggactcggaatacgccaattattacacgagagaagtcatgttgattttgatcagggaatttcaatcgccagacgaggaaatgaagaagatcgttttgaaagtggtgaaacaatgc

SEQ ID NO: 154 - DNA, 712 bp, Phyllotreta striolata
cgagaaactcctgtctcaactgaagctcgaattgactaatttgatgtttctgccaacttcaacggccacagctacaaagcaggaattacttctagcccgtgatgtcttagaaatcggtgtacaatggagtgtagcagccaacgatataaccgcgttcgaaagatacatggctcaattgaaatgctactatttcgattacaacaaccagcttcctgaatctgcatttaagtatcaattactgggattgaatcttctgtttttattgtcgcttaacagagtggcggaatttcatacggagttagaacttctgccggctgatcatatacagaacgatgtgtacataaggcatcccttatcgattgagcaatacttaatggaaggaagttacaataagatcttccttgcaaaaggtaacgttcccgcagcgagctacaccttttttatggacatactgcttgatacgatcagagttgaaattgcggattgtttatcagtagcgtatgaaaagatatctgtaaaggattttactagaatgctctacttgccgaatgaagaagctgctaaaaattttgccaaaaaggcttttcaaaacaaggcttggaaattagaccatgactacttctatttcattcccgaacagaaggcacacgaacctattccttcgaaggaattggcccagcaagcaattgaatacgctaaggaacttgaaatg

SEQ ID NO: 155 - DNA, 371 bp, Phyllotreta striolata
ctacagaagaagcgtccctacgtggctcaaggtaacccccgaagaagtgaaagagcacatcttcaaattgggcaagaagggtctcacgccgtcccaaatcggtgtcatcctgagggactcctacggtgtagcccaagtcaggttcgtgtccggcaacaagatcctgcgcatcatgaaggccatgggactggcgcccgatctacccgaggacttgtactacctcattaagaaagcagtggccatccgcaagcacttggagaggaacagaaaggacaaggacagcaagttccgtttgattttggtagagtctcgtatccaccggctcgccaggtactacaagaccaaatcagtcttagcccctaactggaaat

SEQ ID NO: 156 - DNA, 704 bp, Phyllotreta striolata
ggtcatagatcctttcacgaggaaagattggtacgatgtcaaggcaccgtcgatgttcaccacgcgccaagtcggcaaaaccttggtcaaccgtacccaaggtactagaatcgcatctgagggcttgaaattcagagtcttcgaagtttcattagccgacttacagaacgacaatgatgccgaaaggtctttcaggaagttccgtttgattgctgaagatgttcaaggtagaaacgtattaaccaatttccacggtatggatttgaccaccgacaagctgagatcgatggtgaagaaatggcagactctcatcgaagcttctgctgacgtgaagacttccgatgggttcttgcttagggtattctgtattggtttcaccaacaaagatcagcattcccaaaggaaaacgtgctatgcccagcatacacaagttagagctattcgcaagaagatggtggaaatcatcacccgtgacatccagggttccgacatcaaggaagtagtcaacaaactgttgcccgacagcatagctaaggatatcgagaaggcctgccaaggtatttacccgcttcacgatgtctacattcgtaaggtgaaggtgctgaagaagccgcgtttcgacctttccaagttgttggaattgcacggtgacggcggcaaaggaggcgccggtgacaccaccggtgaaggcggttctaaagtag

SEQ ID NO: 157 - DNA, 722 bp, Phyllotreta striolata
ggattttcattcgaaaactgcaaaagaaatgccttactggaaagcaagggatttaccacccctaaagcaatcaagacaggtactacaatcgtagggatagtttacaaagatggcgtgattcttggggctgatactagagctacagaagatactacggtagccgataaaaactgcgaaaaaatccactttctggcaccaaatatgtattgttgtggtgcaggaactgccgcagacaccgaaatgaccactcaaatggtagcagcccaactggaattgcataagctctacacgaaccgagaagctcgtgtagcgacagccaaccagctcctgaagcaatatttattcagctaccaaggctacattggagctgcgctgattcttggaggcgttgacatcgaagggccccatttgcacatgatttatcctcacggttccagcgtggatttgccttatgctaccatgggatccggttctttagccgccatatcagtgtttgagttaggttggaaaccagagatgggagaagaagagggcatccagctggttagaaacgctatagctgctggtatattcaacgatttaggatctggttccaacgtagatgtgtgtatcatacgtaaaggagtggtggattacagaaggacctacgatgaagccaataaaaagggcgtgagacaaggatcttacaaattccccaggggcgctacggctgttttgtctac

SEQ ID NO: 158 - DNA, 477 bp, Phyllotreta striolata
attgcatatccgcaaattatgccttaacatttgtgtaggagaatctggtgacagacttactcgtgctgctaaggtattagaacaactgactggccaacaaccagtcttctcaaaagcccgatacaccgtcaggtcttttggaattcgtagaaacgaaaagattgctgtacactgcacagtaagaggcgcgaaggccgaggaaatattagaaaggggcttaaaagtcagagaatacgaattgaggagggataacttctctatctctggtaacttcggtttcggtatccaagaacacattgatcttggaatcaagtacgacccgagcataggtatctacggtcttgatttctacgttgtgttgggtcgccccggtttcaacgtagcccaccgaagagcgaagaaaggcaaagttggtttctctcataggttaaccaaagaagacgctatgaagtggttccaacagaaatacgacggaat

SEQ ID NO: 159 - DNA, 435 bp, Phyllotreta striolata
cggagaaatttcaacacattcttcgtatcctcggtacgaatatcgatggaaaaaggaaagtgcaattcgccctcactgccatcaagggagttggtagacgttattccaatattgtcttgaaaaaggcagatgtgaacctagacaagagggctggagaatgttccgacgaagaagttgagaaaattattactattatgtctaatcctcgtcaatacaaaatccctgactggttcttgaacagacagaaggacattattgatggtaaatacagtcagctgacttcttcaagtctcgactcgaagttgcgtgaggatttggaaaggatgaagaagattcgtgcccacagaggtatgagacactactggggtctccgtgtgagaggtcaacacactaagactactggacgtcgtggacgtactgttggtgtgtccaaga

SEQ ID NO: 160 - DNA, 731 bp, Phyllotreta striolata
agatgcagtggaatgttaccaaagggctgcaaatctgtttaaaatggcgaaaaattgggatgctgctggaaaggccttttgcgaagcagcaaacttgcattcgagaagtggggctcgtcatgacgctgctactaatttcgtagacgcagccaactgctataagaaagctgacattagtgaggctgttaattgcttgctgaaagctatagaaatctatacagacatgggtaaatttacgatggcggccaagtaccatcaaaacattgccgaaatgtacgagactgatcccgttgacctagaacgagccgttcagcactacgaacaggcagcggactacttccgaggcgaagagagcaattcatccgcaaacaaatgtcttctaaaagtggcccagtacgcagcacagctcgaaaactacgaaaaagcaatacaaatctaccaagaagtagctttttcggctttagagagttccctgttaaaatacagtgctaaggagtacctgtttagggccgctctctgccatttatgtgtggatattctcaatgcccagcatgctgtagaaagttatattcaaaggtatcctgcatttcaagattcccgggaatataaattgttgaaaacgttgatggaacacattgaagagcagaatgttgatggatatacagatgctgtcaatgattacgattctatttctcgtttagatccttggtatactacgatcttgctgcgta

SEQ ID NO: 161 - DNA, 291 bp, Phyllotreta striolata
caaagccgataaaaagaagaaaaggaggaggaaggaaagttacgcaatctacatttacaaagttttaaagcaagtacatcccgataccggtatttccagtaaggcgatgagcatcatgaacagtttcgtgaatgacatcttcgaaaggattgctgctgaagcttctcgtctggctcattataacaaacgttctactattactagtagagaaatccaaactgctgtgcgtctactccttcccggtgaacttgccaaacacgctgttagtgaaggaactaaggctgttaccaa

SEQ ID NO: 162 - DNA, 255 bp, Phyllotreta striolata
tggtgttcaacaactactggcagccgaaaagcgagctgctgataaagtcacagaggccagaaaacgcaaagcgaggagactaaagcaggccaaggaagaggcccaagatgagatcgagaagtaccgtaaagaaagggaacgccaattccgcgaattcgaggccaagcatatgggctccaaagaggatgtagcctcgaagatcgaacaggacaccaagaggagaatcgaggatatgaacaaggctatccaaagtca

SEQ ID NO: 163 - DNA, 281 bp, Phyllotreta striolata
agttaagggaaaggcaaagtcacgttccaatcgtgccggattacaatttcccgttggtcgtattcacagattattgaggaaaggaaattacgccgaaagagttggtgccggtgctccggtatacttagccgccgttatggaatatttggctgctgaagtattggaattggccggtaatgcagcccgtgataacaagaaaacgagaattattccgagacatttacaattggcaattagaaacgacgaggaattgaataaattactttctggagttacgatcg

SEQ ID NO: 164 - DNA, 672 bp, Phyllotreta striolata
cgctcagaacatgacttttccagaaatcgtcacgcctttcaattttgacaagatgttagagttggttcaaaggggcaattcccaatatccaggagcgaaatatattattagagataacggggaaaggatagatttgagatttcatccgaaaccttcggatttacatctgcaatggggatataaagtcgaaaggcacatcagagacggcgatttggtaatattcaatcgacaaccgactctccacaagatgagtatgatgggtcacagagtcaaagtattgccttggtccacgtttcgtatgaatttatcgtgtacgtccccttacaacgcggatttcgatggcgacgaaatgaatttgcacgtaccgcaaagtatggaaaccagagcggaggtggaaaatatccacatcacgcccagacagattatcacgccgcaagccaacaaacccgtcatgggaattgtacaggacacattaacggctgtcaggaaaatgaccaaacgagacgtgttcattgaaaaggaacaaatgatgaatttgctaatgtttttacctatttgggatggtaaaatgccccgtccggcgatattaaagcccaaacctctgtggactggtaaacaattattttctcttattatccctggaaacgtaaatatgatcagaacgcactctac

SEQ ID NO: 165 - DNA, 439 bp, Phyllotreta striolata
aatgaggatattctctcccgacccgatcgtggctaaatcgcgtttctggtattttctgaggcaacttaggaaattcaagaagaccaccggagaaatcgtttcggtcaagccggtacccgaaaaaacccctaccaagattaagaactttggtatttggttgaggtacgattcccgttccggtacacataacatgtacagggaatacagggacctcagcgtgtctggagctgtaacggcttgctatagggatatgggggctcgtcatcgggctagagcacatgctattcagattattaaagtggaacaagtcaagtcgagcgacaccaggaggccacaagtcaaacaattccacgattcgaagattcggttcccgttgcccaaacgtatccaacacaagtctatgaaccgcttctctgtccgcaaacccagaacatacttc

SEQ ID NO: 166 - DNA, 337 bp, Phyllotreta striolata
taaagtcgtattggtcctcggcggccgatacgccggaaagaaagcggtcgttatcaaaacctgcgatgatggcacgtctgacaaacaatacggacacgctttagtcgctggtattgacaggtatcccaggaaaatccacaagcgtatgggtaaaggcaaaatgcacaaaaggtccaagattaagcctttcatcaaaattttaaactacaatcacttgatgcctaccaggtactcagtagatttagcctctgacttaaaagtaacagctaaggacctgaaagatccgatgaagaggaagaaggctcgtttccagacccgtgtgaaattcgaagaaagg

SEQ ID NO: 167 - DNA, 384 bp, Phyllotreta striolata
gctatacgaccagtttaccgacctaaaattgtcaagaagaggacgaagaagttcattaggcatcagtccgacaggtactcgaagctaaagcgcaactggcgtaaacccaagggtattgacaacagggtaaggaggagattcaagggccaatatttgatgccaaatattggttatggatcagcatctaaaactaggcacatgctacctacaggttttagaaaagtgttggtacacaacgttaaggaactagaggttctactcatgcaaaatcgcaaatactgcgctgaaatagcccacggtgtttcatcgaaaaaacgcaaagatatcgttgaacgtgctcaacaattgagcatcagagtcaccaatggacacgctagattacgt

SEQ ID NO: 168 - DNA, 279 bp, Phyllotreta striolata
attcgaaaatgcggaaactctacttatatcggaggtgcacatgttgttggagcacaggaaagagcaaaacgaatctctggaggacgagcaggaattttcggatgtgttcatgaaaactctaacctacacggatagatttaggaaattcaagaacaaagaaaccatatcggctgtgagaaatttattgatgcagacgaaaaaattgcacaagttcgaattggccgccatagcgaatttgtgcccggaaaccaccgaggaggcgaagtctctgataccgtc

SEQ ID NO: 169 - DNA, 721 bp, Phyllotreta striolata
ttttctgctcacaccgattaccagcaaactagcgaattcatacgaatattgaaacctcctcatttagtgttagttcatggggaacaaaacgaaatgagtcgtttgaaagcggcccttcaaagggaatacgaagacgacagcaacactaccattaacatatacaacccgagaaacacgcattccgtcgaattgtacttcagaggcgagaaaacggcgaaagtaatgggacaattagccgtagatgaaccgcaaaccggcaaaactttgaacggtatattggtcaagaggaatttcaattatcacgttctatcgcccgacgatttaccgaaatataccgatttgaatataagccaaatattgcaaaggcagagtttgcattattccggcaacagcggagttttgagatacatgatatcgcaagtggccggtttattggaatcgatcgacggggagaagaaaatgcgcgccttcaatgcagtagatataataattgaaaataaaatcgtcgttttagagtgggtggcgaatccagtcaacgatatgtacgcagatgcgatagtagcggcgattttgcaagcggatttgttggaacaacccattaaaaacgtgacgacctccgttaaaatggacaggatgcatttcaaggagtgcctgatcgagatgctgcaggacatgtttggagaggattcggtgccgaagatattcaagggggaaaagttgt

SEQ ID NO: 170 - DNA, 714 bp, Phyllotreta striolata
tgttggtcaaagtcatcgataggattttgtacaagctggacgatttggtgaggccgtacgtgcacaaaatcctcgtcgtcatcgaaccgttgctgatcgacgaggattattacgcgcgcgtcgaaggtcgcgagatcatctcgaatctagccaaagcggccggattggcgacgatgatctccacgatgcgtcccgatatcgataacatcgacgagtacgtgcgtaacaccacggctagggctttcgccgtggtggcttcggcgttgggaatcccctcgttgttgccgttccttaaagccgtgtgtagatcgaagaaatcgtggcaagccaggcatacgggtattaagatcgttcaacaaatcgccatactcatgggttgcgcgattctgccgcatctgaaaagcttggtggaaatcatcgagcacggtctagtcgatgaacaacaaaaagtccgtacgattacggctttggggatagctgctttagcggaagccgctacgccgtacggtatcgaaagcttcgattccgtgttgaaaccgctctggaaaggtataaggactcacagaggcaaaggcctggcagcttttctcaaagccatcggttacctgatccctcttatggactccgaatacgccaactactacacgagagaagtgatgttgatattgatcagggaattccaatcgcccgacgaagagatgaagaagatcgtgc

SEQ ID NO: 171 - DNA, 652 bp, Phyllotreta atra
taaatgcgagaaactcctgtctcagctgaagctggaattaaccaatttgatgtttctgccaacttcaacagcgaccgctacgaagcaggaattacttcttgcacgcgatgtcttagaaataggggtacaatggagtgtagcagccaacgatataacagcattcgaaagatatatggctcaattgaaatgctactatttcgattacaacaaccagcttcccgaatctgcgttcaagtatcaattactgggattgaatcttctgtttctattatcgcttaacagagtggctgaatttcacacagagttagaacttctaccggctgatcacatacagaacgatgtgtacataaggcatcctttatcgattgagcaatatttaatggaaggaagttacaataagatattccttgcgaaaggtaatgttcctgcagccagctacaccttttttatggacatactgcttgatacgattcgagttgagattgccgattgtttatcagtagcttatgaaaaaatatctgtaaaggattttacaagaatgctctatttgccgaatgaagaagcagccaagacttttgccaaaaaggctttccaaaataaggcttggaaaatagaccatgactacttctatttcattcccgaacagaaaact

SEQ ID NO: 172 - DNA, 288 bp, Phyllotreta atra
ctcaaagtaacccccgaagaagtgaaagagcacatcttcaaattgggcaagaaaggcctcacgccgtcccaaatcggtgtcatccttagggattcctacggaggggcccaagtaagtttcgtctccggcaacaatatcctccgcatcatgaaggccatgggcctggcgcccgacctccccgaggacttgtactacctcatcaagaaggcagtggccatccgcaagcacttggagaggaacaggaaagacaaggacagcaagttccgcttgatcttggtagagtctcgt

SEQ ID NO: 173 - DNA, 606 bp, Phyllotreta atra
ttctgaaggcctgaaattcagagtcttcgaagtttcgttagccgacttacagaacgataatgatgccgaaaggtctttcaggaagttccgtttgattgctgaagatgttcaaggtagaaacgtattaaccaatttccatggtatggacttgaccacggataagctgcgatcgatggttaagaaatggcagactcttattgaagcttcggctgatgtgaaaacttccgatgggtttttgcttagggtattttgtattggtttcaccaacaaagatcagcattcccaaaggaaaacgtgctatgcccagcatacacaagttagagctattcgcaagaagatggtggagatcatcacccgtgacatccagggctccgacatcaaagaagtagtcaacaagctgcttcccgacagcatagctaaggatatcgagaaggcctgccaaggtatttacccgcttcacgatgtctacattcgtaaggtgaaggtgctcaagaagccgcgtttcgacctttccaaattgttggaattgcacggcgacggcggcaaagggggcgccggtgaagctggcggcgaaggcggttctaaagtagataggccagagggata

SEQ ID NO: 174 - DNA, 695 bp, Phyllotreta atra
cttactggaaagcaagggatttaccactcccaaggcgataaagacaggtactacaatcgtagggatagtttacaaagatggcgtgatacttggggctgatactcgagctacagaagacaccacagtggccgataaaaactgcgaaaaaatccactttttggctccaaatatgtattgttgtggtgcaggaactgccgcagacaccgaaatgaccactcaaatggtagcagcgcaactggaattgcacaagctctacacgaatagagaagctcgcgtagccacagctaaccagctcctgaagcaatatttattcagttaccaaggttacattggagctgcgctgatccttggaggcgtagacatcgaagggccccatttacacatgatctatcctcacggttctagcgtggatttgccttacgctactatgggatccggttcattagctgctatatcggtgtttgagttaggttggaagccggagatgggagaagaagagggcattcagctcgttagaaacgctatagctgctggtatctttaacgatttaggatctggttccaacgttgatgtatgtatcatacggaagggagtagtagactacagaaggacttatgatgaagccaataagaaaggcgtaagacaaggatcttataaattccccaggggtgctacggctgttttgtccactaaag

SEQ ID NO: 175 - DNA, 430 bp, Phyllotreta atra
tgccttaacatttgtgtaggagaatctggtgacagacttactcgtgctgctaaggtattagaacaactgactggtcaacaaccagttttctccaaagccagatacaccgtcaggtcttttggaattcgtagaaacgaaaaaattgctgtgcactgcacagtaagaggcgcgaaggccgaggaaatattagaaaggggcttaaaagtcagagaatacgaattgaggagggataacttctctatctctggtaacttcggtttcggtatccaagaacacattgatcttggaatcaagtacgaccctagcataggtatttacggtcttgatttctacgttgtattgggtcgccccggcttcaacgtagcccaccgaagagcgaagaagggaaaagttggtttctctcataggttgaccaaagaagacgctatga

SEQ ID NO: 176 - DNA, 323 bp, Phyllotreta atra
cgatggaaaaaggaaagtgcaattcgccctcaccgccatcaagggtgtcggtaggcgttattccaatattgtcttgaaaaaggcagatgtgaatttagacaagagggccggagaatgttctgacgaagaagttgaaaagatcattaccattatgtctaatcctcgtcaatacaaaatccctgactggttcttgaacagaccgaaggacattattgatggtaaatacagtcagctgacttcttcaagtcttgactcgaagttgcgtgaggatttggaaaggctgaagaagatccgtgcgcacagaggtatgagacactactggg

SEQ ID NO: 177 - DNA, 811 bp, Phyllotreta atra
gggattcttcggttctcttttcggagggtccagtcgcatcgaggatgcagtggaatgttaccaaagggctgcgaatttgtttaaaatggcgaaaaattgggatgctgctggaaaagccttttgtgaagcagcaaacttgcattcgagaagcggggctcgtcatgatgctgcaactaattttgtggacgcggccaactgctataagaaagctgacatcagtgaggctgttaattgcttgctgaaagctatagaaatctatacagacatgggaaaatttacgatggcggccaagtaccatcaaaacattgccgaaatgtacgagactgatcccgttgacctagaacgagccgttcagcactacgaacaggctgcggactacttccgaggagaagagagcaattcatccgcaaacaaatgtcttctaaaagttggccagtacgcagcgcagctggaaaactacgaaaaagcaatacaaatctaccaagaagtagctttttcagctttagagagttccctgttaaaatacagtgctaaggagtacctgttcagggctgctctctgccatttatgtgtggatattctcaatgcccagcatgctgtagaaagttatattcaaaggtatcctgcatttcaagattcccgggaatataaattgttgaaaacgttgatggaacacattgaagagcagaatgttgatggatatacagatgctgtcaacgattatgattctatctctcgtttagatccttggtatactacaatcttgctgcgtattaaaaagcaacttaatgagagtcccgatttgcgttaa

SEQ ID NO: 178 - DNA, 238 bp, Phyllotreta atra
aaagaacatttccaaagccgataaaaagaagaaaaggaggaggaaggaaagttacgcaatctacatttacaaagttttaaagcaagtacatcccgacaccggtatttccagtaaggcgatgagtattatgaacagtttcgtgaatgacatcttcgaaagaattgccgctgaagcttctcgtctggctcattataacaaacgatctactattactagtagagaaatccaaactgctgtg

SEQ ID NO: 179 - DNA, 232 bp, Phyllotreta atra
agaggccagaaaacgtaaagcgaggaggctgaagcaggccaaggaagaggcccaggacgagatcgaaaagtaccgcaaggaaagggagcgccagttccgcgagttcgaggccaagcacatgggctccaaggaggacgtcgctgcgaagatcgaccaggacaccaagcgaagaatcgaggatatgaacaaggctatccagagccagaaggaacccgtgattcgaaacatcttg

SEQ ID NO: 180 - DNA, 295 bp, Phyllotreta atra
ggacttcaattcccggtcggacgtcttcatcgtctgttgcgcaaaggtcattacgccgagcgcgttggcgccggtgcacccgtctacctggctgccgtattggaatacctcgccgctgaagttctcgagttggctggcaacgctgcccgtgacaacaagaagacgcgaatcaatccgcgccacttgcagctggcggttcgtaacgacgaagagctcaataagctgatggctggcgtgacaatcgctcaaggcggtgtcctccctaacatcaacgccgttctgctgcctaagaaga

SEQ ID NO: 181 - DNA, 744 bp, Phyllotreta atra
gacgccgacaaatgtaaaatgggcatacctatacctcaagctcacagttcggatctcatgacgtccggcatgttcttcggctcggcggcgacgccgagcagcatgagccccggcggtgctatgactccttgggctaatgccaatacgccttatgtaggcagtgagtggtcgccacaaaatatgatgggtagtggtatgacaccaggaggagcagcgttttctccctctgcggcatcagatgcttctggaatgtcaccagcttacggagcttggtctccgacgcctcaatctcctgctatgtctccttatatggcgtctcctcacggccaatcgccttcttacagtccttcgagtccggcattcatacccacctcgccgtctatgacgcccacatcgccgggatattctccaagttctccaggttattcgcctaccagtcctaattacagtccgacgagtcccagttactctccgacatctccgagttattcaccgacgtcgcctagttacagcccgacgtctcctagctattcgcctacttctccgagttacagtcctacatctcctagttactcaccgacgtcgccgagttatagtccaacgtctccgagttactcgcctacttctcctagttacagtcctacgtctccgagttactcgccgacgtcgccgagttatagtccaacatctccgaattattcgcctacatctccgaattattcgcctacatctccgagctattcg

SEQ ID NO: 182 - DNA, 348 bp, Phyllotreta atra
ccacagaaaaggagcctaaaactcctttatataaaatgaggatcttcgctcccgatcaaattgtggccaagtctcgtttctggtatttcttgagacagctaaagaagttcaagaaagctaccggtgagatcgtctcggtcaaacccattccagaaaaaactcccaccaaaatcaagaactttggtatttgggtgaggtacgactctcgttcaggaactcacaacatgtacagagaatatagagatttgagtgtttccggtgctgtaactcaatgctacagagatatgggagctagacatcgtgctagagctcattcaattcagattattaaagtggagcaagtcaagg

SEQ ID NO: 183 - DNA, 260 bp, Phyllotreta atra
cgtagtgattaaaacctgcgacgatggcacgtctgacaaacaatacggacacgctctagtcgctggcatcgacaggtatcccaggaaaatccacaagcgtatgggcaaaggcaaaatgcacaaaaggtccaagattaagcctttcatcaaagttttaaactacaatcacttgatgcccactaggtattcggtagatttagcatccgatttaaaagtaaccgctaaggatttgaaagacccgatgaagaggaagaaggctc

SEQ ID NO: 184 - DNA, 263 bp, Phyllotreta atra
agttcataaggcatcagtccgacaggtactcgaagctaaagcgtaactggcgtaaacccaagggtattgacaacagggtaagaaggagattcaagggccaatatttaatgccaaatattggttatggatcagcatctaaaactaggcacatgctacctacaggttttagaaaagtgttggtgcacaacgttaaggaactagaggttctactcatgcaaaatcgtaaatactgtgctgaaatagctcacggtgtgtcatctaaa

SEQ ID NO: 185 - DNA, 291 bp, Phyllotreta atra
ttccccaaagagttcgaaaacgccgaaactctacttatatctgaagttcacatgctgctggagcataggaaagagcaaaacgaatctctggaggatgaacaagaattttcggatgtgttcatgaaaactctcacttacacggacagatttagaaaattcaagaacaaagaaaccatatcggctgtgaggaatttattgatgcaaacgaaaaagctgcacaagttcgaactggccgccatcgcgaatctgtgcccggaaaccaccgaggaggccaagtctctgataccatcg

SEQ ID NO: 186 - DNA, 694 bp, Phyllotreta atra
ggtcaagaagtaggacgatcatgcattatgattgaatttaaagggaaaaaaatcatgttggattgtgggatacatccaggcctatccggtatggatgctctaccattcgttgacttaattgaagccgatgaaatcgatatactacttatatcccattttcatctcgatcacagcggagcattgccttggtttctgttaaaaaccagcttcaaaggccgttgtttcatgacccatgctacaaaggctatatacaggtggctgttgtctgactacattaaagtcagtaatattgccacggaacaaatgctatacacagaagccgatttggaagccagcatggataaaatcgaaacgataaatttccacgaagaaaaagatgtactgggtgttaaattttgggcttacaacgccggacacgttctaggagctgctatgttcatgatcgaaatagctggtgttaaaatattgtatactggagatttttctcgacaagaagacaggcatttaatggctgcggaaatacccacgatacatccggacgtgctaataacggaatctacttatggtacacatattcacgagaaaagggaggatcgcgagactcgtttcactacattagtaaacgatatcgtaaatagaggtggaaggtgtcttataccagtatttgccttaggaagagcacaagaattgttgc

SEQ ID NO: 187 - DNA, 724 bp, Phyllotreta atra
tagacacaccggcataaaaatagtgcaacaaatcgccatactcatgggttgcgcgattctgcctcacttgaaaagcttggtggaaattatagagcacggtttggtcgatgaacagcaaaaagttcgtacgatcacggctttaggaatagctgctctggccgaagccgctacgccgtacggtatagaaagcttcgattccgtattgaaacccctgtggaagggtataagaactcacaggggtaaaggactggccgctttcctcaaagccatcggttacctgatacctctcatggattcggaatacgccaattactacacgagagaagtgatgttgattttgatcagggaattccaatcgcccgacgaggaaatgaagaaaatcgtgctcaaagtggtgaaacagtgttgttcgaccgacggcgtggaatcgcaatatataaaggaggagatcctgccgcagtttttcaagcatttctggaaccacaggatggccttggacagaaggaactacaggcaactggtggataccacggtggagattgcgaataaagttggagcttcggagattatcaacagaatagtggacgatttgaaagatgaaaacgaagcgtacaggaagatggtgatggagagtatagagaagatcatggggaatttgggagcggccgatgtggattcgagattggaggagcagctgatcgatgggattttgtacgctttccag

SEQ ID NO: 188 - DNA, 658 bp, Phyllotreta cruciferae
tctcaactgaagctcgaattaaccaatttgatgtttctgccaacttcaacagcgaccgctacgaagcaggaattacttcttgctcgcgatgtcttagaaataggggtacaatggagtgtagcagccaacgatataactgcattcgaaagatatatggctcaattgaaatgctactatttcgattacaacaaccagcttcccgaatctgcttttaagtatcaattactgggattgaatcttctgtttttattatcgcttaacagagtggctgaatttcatacagagttagaacttctaccggctgatcacatacagaacgacgtgtacataaggcatcctttatcgattgagcaatatttaatggaaggaagttacaataagatattccttgcgaaaggtaatgttcctgcagccagctacaccttttttatggacatactgcttgatacgattcgagttgaaattgcggattgtttatcagtagcctatgaaaaaatatctgtaaaggattttacaagaatgctctatttgccgaatgaagaagcagccaagacttttgccaaaaaggctttccaaaataaggcttggaaattagaccatgactacttctatttcattcccgaacagaaaactcatgaacctattccttcgaaagagc

SEQ ID NO: 189 - DNA, 311 bp, Phyllotreta cruciferae
agaagtgaaagagcacatcttcaaattgggcaagaaaggcctcacgccgtcccaaatcggtgtcatccttagggattcctacggagtggcccaagtgaggttcgtctccggcaacaagatcctccgcatcatgaaggccatgggactggcgcccgacctacccgaggacttgtactacctcatcaagaaggcagtggccatccgcaagcacttggagaggaacaggaaggacaaggacagcaagttccgcttgatcttggtggagtctcgtatccaccggctcgccaggtactacaagaccaagacagtcc

SEQ ID NO: 190 - DNA, 650 bp, Phyllotreta cruciferae
gaaggtaattgatcctttcacgaggaaagactggtacgatgtcaaggccccatcgatgttcaccactcgccaggttggcaaaaccttggtcaaccgtacccaaggtactagaatcgcttctgaaggcctgaaattcagagtcttcgaagtttcgttagccgacttacagaacgataatgatgccgaaaggtctttcaggaagttccgtttgattgctgaagatgttcaaggtagaaacgtattaaccaatttccatggtatggacttgaccacggataagctgcgatcaatggttaagaaatggcagactcttattgaagcttcagctgatgtgaaaacttccgatgggtttttgcttagggtattctgtattggtttcaccaacaaagatcagcattcccaaaggaaaacgtgctatgcccagcatacacaagttagagctattcgcaagaagatggtggagatcatcacccgtgacatccagggctccgacatcaaagaagtagtcaacaaactgcttcccgacagcatagctaaggatatcgagaaggcctgccaaggtatttacccgcttcacgatgtctacattcgtaaggtgaaggtgctcaagaagccgcgtttcgacctttccaaattgttggaattgcacg

SEQ ID NO: 191 - DNA, 672 bp, Phyllotreta cruciferae
cttactggaaagcaagggatttaccactcccaaggccataaagacaggtactacaatcgtagggatagtttacaaagatggtgtgatacttggtgctgatactcgagctacagaagataccacagtggccgataaaaactgcgaaaaaatccactttttggcaccaaacatgtattgttgtggtgcaggaactgccgcagacaccgaaatgaccactcaaatggtagcagcgcaactcgaattgcacaagctctacacgaatagagaagctcgcgtagcaacagctaaccagctcctgaagcaatatttattcagttaccaaggttacattggagctgcgctgatccttggaggcgtagacatcgaagggccccatttacacatgatctatcctcacggttctagtgtggatttgccttacgctacaatgggatccggttcattagctgctatatcagtgtttgaattaggttggaagccggagatgggagaagaagagggcattcagctcgttagaaacgctatagctgctggtatctttaacgatttaggatctggttccaacgttgatgtatgtatcatacggaaaggagtagtagattacagaaggacttacgatgaagctaacaagaaaggcgtaagacaaggatcttataaatttcccaggggtgc

SEQ ID NO: 192 - DNA, 388 bp, Phyllotreta cruciferae
cgtgctgctaaggtattagaacaactgactggccaacaaccagttttctcaaaagccagatacaccgtcaggtcttttggaattcgtagaaacgaaaaaattgctgtgcactgcacagtaagaggcgcgaaggccgaggaaatattagaaaggggcttaaaagtcagagaatacgaattgaggagggataacttctctatctctggtaacttcggtttcggtatccaagaacacattgatcttggaatcaagtacgaccctagcataggtatttacggtcttgatttctacgttgtattgggtcgccctggcttcaacgtagcccaccgaagagcgaagaaaggaaaagttggtttctctcataggttaaccaaagaagacgctatga

SEQ ID NO: 193 - DNA, 310 bp, Phyllotreta cruciferae
agtcatgtttgcattgactgccatcaagggtgtgggaagacgttatgccaatattgtattgaaaaaagctgatatcgatcttgataaacgtgctggagaatgctccgaagaagaagtcgaaaaaattgtcacaattatgacaaatccaagacaatacaaaattcctgactggttcctcaacagacagaaggatatcgttgacggaaaatattcacagctcactagttccaatttggattcgaaacttcgtgaggatttggagcgcatgaagaagattcgcgcccacagaggtcttcgtcattattggggt

SEQ ID NO: 194 - DNA, 682 bp, Phyllotreta cruciferae
ggggatttttcggatctcttttcggagggtccagtcgcattgaggatgcagtggaatgttaccaaagggctgcaaatttgtttaaaatggcgaaaaattgggatgctgctggaaaagccttttgtgaagcagcaaacttacattcgagaagtggggctcgtcatgatgctgcaactaattttgtggacgcggccaactgctataagaaagctgacatcagtgaggctgttaattgcttgctgaaagctatagaaatctatacagacatggggaaatttacgatggcggccaagtaccatcaaaacattgccgaaatgtacgagactgatcctgttgacctagaacgagccgttcagcactacgaacaggctgcggactacttccgaggagaagagagcaattcatctgcaaacaaatgtcttctaaaagttgcccagtacgcagcacagctcgaaaactacgaaaaagcaatacaaatctaccaagaagtagctttttcagctttagagagttccctgttaaaatacagtgctaaggagtacctatttagggctgctctctgccatttatgtgtggatattctcaatgcccagcatgctgtagaaagttatattcaaaggtatcctgcatttcaagattcccgggaatataaattgttgaaaaccttgatggaacacattga

SEQ ID NO: 195 - DNA, 239 bp, Phyllotreta cruciferae
aaagaacatttccaaagctgataaaaagaagaaaaggaggaggaaggaaagttacgcaatctacatttacaaagttttaaagcaagtacatcccgacaccggtatttccagtaaggcgatgagtattatgaacagtttcgtaaatgacatcttcgaaagaattgccgctgaagcttctcgtctggctcattataacaaacgatctactattactagtagagaaattcaaactgctgtgc

SEQ ID NO: 196 - DNA, 207 bp, Phyllotreta cruciferae
tgctgacaaagttacagaggccagaaaacgtaaagcgaggaggctaaagcaggccaaggaagaggcccaagatgagatcgaaaagtaccgtaaagaaagggagcgccagttccgcgagttcgaggccaagcatatgggctccaaggaggatgtcgcttcgaagatcgaccaggacaccaagagaagaatcgaggatatgaacaaggc

SEQ ID NO: 197 - DNA, 239 bp, Phyllotreta cruciferae
caatttccggtaggtcgtattcacagattattgaggaaaggaaattacgctgaacgagttggagccggtgctccggtatacttagctgccgttatggaatatttggctgctgaagtattggaattggccggtaatgcagctcgtgacaacaagaaaacaagaataattccgagacatttgcaattggctattaggaatgacgaggaattgaataaattactttctggtgtaacaatcgc

SEQ ID NO: 198 - DNA, 662 bp, Phyllotreta cruciferae
attatgaacagcgacgatgagaaattcggagaagacgaagacgtggacaaaatggacgatgacatgttcctcagatgcatcgaggctaatatgctgagtgacatgacactccaaggcatagaagccatttcaaaagtctacatgcatttaccacaaacagactcgaagaaacgcatagtaattacggatactggcgaattcaaggctattgctgaatggttgctcgaaacagacggtaccagtatgatgaaagtactgtcggaaagagatgtagaccccgttagaacgttttcgaacgatatttgcgaaatattttcggtgttgggaatagaagctgttcgaaaatcggtcgaaaaagaaatgaacgccgtacttcaattctacggtctgtacgtaaactacagacatctcgctctgctttgtgatgttatgacggccaaaggacatttaatggccattactcgtcacggtataaacagacaagatacgggagcgctgatgagatgctctttcgaggaaaccgtcgacgtactgatggacgcttccagtcacgccgaagtcgatccgatgagaggtgtatcggagaacatcattctcggccaattgccgaggatgggaactggctgtttcgacttgttgttggacgccgacaaatgtaaaat

SEQ ID NO: 199 - DNA, 385 bp, Phyllotreta cruciferae
accgataaagagaaaagccccccattgtataaaatgaggatattctctcccgacccgatcgtggctaaatcgcgtttctggtattttctgagacaacttaggaaattcaagaagaccaccggagaaatcgtttcggtcaagctggtacccgaaaaaacccctactaagattaagaactttggtatatggttgaggtacgattcccgttccggtacgcataacatgtacagggaatacagagaccttagcgtttctggagctgtaacggcttgctatagagacatgggagctcgtcatcgggctagagcacatgctattcagattattaaagtggaacaagttaagtcgagcgacaccaggaggccacaagtgaaacaattccacg

SEQ ID NO: 200 - DNA, 258 bp, Phyllotreta cruciferae
caagaaggccgtagtcattaaaacctgcgacgatggcacgtctgacaaacaatacggacacgctctagtcgctggtatagacaggtatcccaggaaaatccacaagcgtatgggcaaaggcaaaatgcacaaaaggtccaagattaagcctttcatcaaagttttaaactacaatcacttgatgcccactaggtactcggtagatttagcgtccgatttaaaagtaacggctaaggatttgaaagacccgatgaagag

SEQ ID NO: 201 - DNA, 264 bp, Phyllotreta cruciferae
cgctatgataaactcaagcgaaactggcgtaaaccgaaaggtattgataacagagttcgtaggcgcttcaagggtcaatatttgatgcccaacattggttacggaagtaacaaaaaaactcgtcacatgcttcccactggattccgaaaggttctcgtccacaatgtcaaggaacttgaagttcttatgatgcaaaatcgtaaattttgtgcagaaattgcacatgcagttagcagtaaaaaacgaaaagaaatcgttgaacgc

SEQ ID NO: 202 - DNA, 272 bp, Phyllotreta cruciferae
acgccgagactctacttatatccgaagtgcacatgctgctggagcacaggaaagagcaaaacgaatctctggaggatgagcaagaattttcggatgtgttcatgaaaactctgacttacacagacagatttagaaaattcaagaacaaagaaaccatatcggctgtgagaaatttattgatgcaaacgaagaagctgcacaagttcgaactggccgccatcgccaacctgtgcccggaaaccaccgaggaggccaagtctctgataccgtcg

SEQ ID NO: 203 - DNA, 760 bp, Phyllotreta cruciferae
tcgaaatagctggtgtcaaaatattgtatactggagatttttctcgacaagaagacaggcatttaatggctgcggaaatacccacgatacatccggacgtgttaataacggaatctacttatggtacgcatattcacgagaaaagggaggatcgtgagactcgtttcactacactagtaaacgatatcgtaaatagaggtggaaggtgtctcataccagtatttgcgttaggaagagcacaggaattgttgcttattttagatgaatattggagtcaacatcccgaactccacgacatcccgatctactacgcttcatcgttagcgaagaaatgcatggccgtgtatcagacttacataaacgccatgaatgacaaaatcaagcgacaaatagcgattaataacccgtttgtattcaaacatatatctaatttaaagggtatcgatcattttgatgatattggaccgtgcgtggtgatggcatcacccggtatgatgcaaagcggcttgtccagagaactgttcgaaacttggtgtactgatgcgaaaaatggagttatcatagcaggttactgcgtcgaaggaactttagctaaaacaatattatccgaaccagaagaaatcaccacaatggtggggcaaaagctacccttaaaaatgtctgttgattacatatcattttctgctcacactgattaccagcagaccagcgagtttatacgaatgttgaaacctcctcacctagtgttagttcatggcga

SEQ ID NO: 204 - DNA, 766 bp, Phyllotreta cruciferae
cggttacttgataccgcttatggattctgaatacgccaattactatacgagagaagtgatgttgattttgatcagggaattccaatcgcccgatgaggaaatgaagaaaatcgtgctcaaagttgtgaaacagtgttgttcgaccgacggtgtggaatcgcaatatatcaaggaggagatcctgccgcaatttttcaagcatttctggaaccacaggatggcattggatagaagaaattacaggcaattggtggacactacggtggagattgccaacaaagtgggagcttcggagattataaatcgaatagtggacgatttgaaagatgaaaacgaggcgtacaggaaaatggtgatggagagtatagagaagatcatggggaatctgggagcggccgatgtggattcgagattggaggagcagttaatcgatggaattttgtacgctttccaggagcagacgactgaggatgtggtgatgttgaatggtttcggtacgatcgtaaaccaactgggcaaacgcgtcaaaccgtatttaccgcaaatttgcggtacgatcctgtggcgtttgaacaacaaatccgccaaagtgcgccaacaggcggccgatttgatttcccgcatagccgtcgtgatgaagacctgccaggaggagaaactgatgggccatttgggcgtcgtgctctacgagtacctcggcgaggagtacccggaagtgttgggttccattttgggcgctttaaaagccatcgtaaacgtcataggt

SEQ ID NO: 205 - DNA, 20 bp, Phyllotreta armoraciae
taaatgcgagaaactcctgt

SEQ ID NO: 206 - DNA, 19 bp, Phyllotreta armoraciae
tacagaagaagcgtcccta

SEQ ID NO: 207 - DNA, 19 bp, Phyllotreta armoraciae
attggtacgatgtcaaggc

SEQ ID NO: 208 - DNA, 20 bp, Phyllotreta armoraciae
cttactggaaagcaagggat

SEQ ID NO: 209 - DNA, 21 bp, Phyllotreta armoraciae
tgccttaacatttgtgtagga

SEQ ID NO: 210 - DNA, 20 bp, Phyllotreta armoraciae
aaagaaaagtgcaattcgcc

SEQ ID NO: 211 - DNA, 20 bp, Phyllotreta armoraciae
ggggatttttcggatctctt

SEQ ID NO: 212 - DNA, 22 bp, Phyllotreta armoraciae
agccgataaaaagaagaaaagg

SEQ ID NO: 213 - DNA, 20 bp, Phyllotreta armoraciae
ttacagaggctagaaaacgc

SEQ ID NO: 214 - DNA, 20 bp, Phyllotreta armoraciae
ccggattacaatttcccgta

SEQ ID NO: 215 - DNA, 20 bp, Phyllotreta armoraciae
tagtcccgatgaaattcgtc

SEQ ID NO: 216 - DNA, 20 bp, Phyllotreta armoraciae
accgataaagagaaaagccc

SEQ ID NO: 217 - DNA, 20 bp, Phyllotreta armoraciae
aaagccgtcgtcattaaaac

SEQ ID NO: 218 - DNA, 20 bp, Phyllotreta armoraciae
agttcataaggcatcagtcc

SEQ ID NO: 219 - DNA, 20 bp, Phyllotreta armoraciae
attcgaaaacgctgaaactc

SEQ ID NO: 220 - DNA, 20 bp, Phyllotreta armoraciae
tttctcgacaagaagacagg

SEQ ID NO: 221 - DNA, 20 bp, Phyllotreta armoraciae
aaagtggtgaagcaatgttg

SEQ ID NO: 222 - DNA, 20 bp, Psylliodes chrysocephala
gacatctacagctacagcaa

SEQ ID NO: 223 - DNA, 20 bp, Psylliodes chrysocephala
gaagaagtgtccctacatgg

SEQ ID NO: 224 - DNA, 20 bp, Psylliodes chrysocephala
ggtagttgaccctttcacaa

SEQ ID NO: 225 - DNA, 20 bp, Psylliodes chrysocephala
gaaatgctacactggaaagc

SEQ ID NO: 226 - DNA, 20 bp, Psylliodes chrysocephala
agggaattgcatatccgaaa

SEQ ID NO: 227 - DNA, 20 bp, Psylliodes chrysocephala
gggtgttggtagacgttatt

SEQ ID NO: 228 - DNA, 20 bp, Psylliodes chrysocephala
ttctctttttggtgggtcaa

SEQ ID NO: 229 - DNA, 20 bp, Psylliodes chrysocephala
gaggaaggaaagttatgcca

SEQ ID NO: 230 - DNA, 22 bp, Psylliodes chrysocephala
catcaaagccatggtgttcaac

SEQ ID NO: 231 - DNA, 20 bp, Psylliodes chrysocephala
ccagttggtcgtattcatcg

SEQ ID NO: 232 - DNA, 20 bp, Psylliodes chrysocephala
ggaaactagagcggaagtag

SEQ ID NO: 233 - DNA, 27 bp, Psylliodes chrysocephala
gctaaatcacgtttttggtatttcttg

SEQ ID NO: 234 - DNA, 20 bp, Psylliodes chrysocephala
aaacagtatggacatgcctt

SEQ ID NO: 235 - DNA, 20 bp, Psylliodes chrysocephala
atggaaaactaaagcgcaac

SEQ ID NO: 236 - DNA, 20 bp, Psylliodes chrysocephala
atttgaaaatgccgaaacgt

SEQ ID NO: 237 - DNA, 20 bp, Psylliodes chrysocephala
cagagtctacttatggcacc

SEQ ID NO: 238 - DNA, 20 bp, Psylliodes chrysocephala
gcttagtccagaggaacaaa

SEQ ID NO: 239 - DNA, 20 bp, Phyllotreta nemorum
cttgcgaaaggtaatgttcc

SEQ ID NO: 240 - DNA, 20 bp, Phyllotreta nemorum
gagcacatcttcaaattggg

SEQ ID NO: 241 - DNA, 20 bp, Phyllotreta nemorum
gaaggattggtacgatgtca

SEQ ID NO: 242 - DNA, 20 bp, Phyllotreta nemorum
cgaaatgaccactcaaatgg

SEQ ID NO: 243 - DNA, 20 bp, Phyllotreta nemorum
tcaacaaccagttttctcca

SEQ ID NO: 244 - DNA, 20 bp, Phyllotreta nemorum
cgatggaaaaaggaaagtgc

SEQ ID NO: 245 - DNA, 20 bp, Phyllotreta nemorum
aaggggatttttcggatctc

SEQ ID NO: 246 - DNA, 20 bp, Phyllotreta nemorum
ggtatttccagtaaggcgat

SEQ ID NO: 247 - DNA, 20 bp, Phyllotreta nemorum
agttacagaggccagaaaac

SEQ ID NO: 248 - DNA, 20 bp, Phyllotreta nemorum
cctgtaggtcgtattcacag

SEQ ID NO: 249 - DNA, 20 bp, Phyllotreta nemorum
agtgtttcacatcggattca

SEQ ID NO: 250 - DNA, 20 bp, Phyllotreta nemorum
cgcttcctttccgttaaaaa

SEQ ID NO: 251 - DNA, 20 bp, Phyllotreta nemorum
aaagccgtcgtcattaaaac

SEQ ID NO: 252 - DNA, 20 bp, Phyllotreta nemorum
agttcataaggcatcagtcc

SEQ ID NO: 253 - DNA, 20 bp, Phyllotreta nemorum
ccccaaagaattcgaaaacg

SEQ ID NO: 254 - DNA, 20 bp, Phyllotreta nemorum
ttttctgctcacaccgatta

SEQ ID NO: 255 - DNA, 20 bp, Phyllotreta nemorum
tgttggtgaaagtcatcgat

SEQ ID NO: 256 - DNA, 20 bp, Phyllotreta striolata
cgagaaactcctgtctcaac

SEQ ID NO: 257 - DNA, 20 bp, Phyllotreta striolata
ctacagaagaagcgtcccta

SEQ ID NO: 258 - DNA, 20 bp, Phyllotreta striolata
ggtcatagatcctttcacga

SEQ ID NO: 259 - DNA, 20 bp, Phyllotreta striolata
ggattttcattcgaaaactg

SEQ ID NO: 260 - DNA, 20 bp, Phyllotreta striolata
attgcatatccgcaaattat

SEQ ID NO: 261 - DNA, 20 bp, Phyllotreta striolata
cggagaaatttcaacacatt

SEQ ID NO: 262 - DNA, 20 bp, Phyllotreta striolata
agatgcagtggaatgttacc

SEQ ID NO: 263 - DNA, 20 bp, Phyllotreta striolata
caaagccgataaaaagaaga

SEQ ID NO: 264 - DNA, 20 bp, Phyllotreta striolata
tggtgttcaacaactactgg

SEQ ID NO: 265 - DNA, 20 bp, Phyllotreta striolata
agttaagggaaaggcaaagt

SEQ ID NO: 266 - DNA, 20 bp, Phyllotreta striolata
cgctcagaacatgacttttc

SEQ ID NO: 267 - DNA, 20 bp, Phyllotreta striolata
aatgaggatattctctcccg

SEQ ID NO: 268 - DNA, 20 bp, Phyllotreta striolata
taaagtcgtattggtcctcg

SEQ ID NO: 269 - DNA, 20 bp, Phyllotreta striolata
gctatacgaccagtttaccg

SEQ ID NO: 270 - DNA, 20 bp, Phyllotreta striolata
attcgaaaatgcggaaactc

SEQ ID NO: 271 - DNA, 20 bp, Phyllotreta striolata
ttttctgctcacaccgatta

SEQ ID NO: 272 - DNA, 20 bp, Phyllotreta striolata
tgttggtcaaagtcatcgat

SEQ ID NO: 273 - DNA, 20 bp, Phyllotreta atra
taaatgcgagaaactcctgt

SEQ ID NO: 274 - DNA, 19 bp, Phyllotreta atra
ctcaaagtaacccccgaag

SEQ ID NO: 275 - DNA, 20 bp, Phyllotreta atra
ttctgaaggcctgaaattca

SEQ ID NO: 276 - DNA, 20 bp, Phyllotreta atra
cttactggaaagcaagggat

SEQ ID NO: 277 - DNA, 21 bp, Phyllotreta atra
tgccttaacatttgtgtagga

SEQ ID NO: 278 - DNA, 20 bp, Phyllotreta atra
cgatggaaaaaggaaagtgc

SEQ ID NO: 279 - DNA, 20 bp, Phyllotreta atra
gggattcttcggttctcttt

SEQ ID NO: 280 - DNA, 20 bp, Phyllotreta atra
aaagaacatttccaaagccg

SEQ ID NO: 281 - DNA, 20 bp, Phyllotreta atra
agaggccagaaaacgtaaag

SEQ ID NO: 282 - DNA, 18 bp, Phyllotreta atra
ggacttcaattcccggtc

SEQ ID NO: 283 - DNA, 20 bp, Phyllotreta atra
gacgccgacaaatgtaaaat

SEQ ID NO: 284 - DNA, 20 bp, Phyllotreta atra
ccacagaaaaggagcctaaa

SEQ ID NO: 285 - DNA, 20 bp, Phyllotreta atra
cgtagtgattaaaacctgcg

SEQ ID NO: 286 - DNA, 20 bp, Phyllotreta atra
agttcataaggcatcagtcc

SEQ ID NO: 287 - DNA, 20 bp, Phyllotreta atra
ttccccaaagagttcgaaaa

SEQ ID NO: 288 - DNA, 20 bp, Phyllotreta atra
ggtcaagaagtaggacgatc

SEQ ID NO: 289 - DNA, 20 bp, Phyllotreta atra
tagacacaccggcataaaaa

SEQ ID NO: 290 - DNA, 20 bp, Phyllotreta cruciferae
tctcaactgaagctcgaatt

SEQ ID NO: 291 - DNA, 20 bp, Phyllotreta cruciferae
agaagtgaaagagcacatct

SEQ ID NO: 292 - DNA, 22 bp, Phyllotreta cruciferae
gaaggtaattgatcctttcacg

SEQ ID NO: 293 - DNA, 20 bp, Phyllotreta cruciferae
cttactggaaagcaagggat

SEQ ID NO: 294 - DNA, 20 bp, Phyllotreta cruciferae
cgtgctgctaaggtattaga

SEQ ID NO: 295 - DNA, 20 bp, Phyllotreta cruciferae
agtcatgtttgcattgactg

SEQ ID NO: 296 - DNA, 20 bp, Phyllotreta cruciferae
ggggatttttcggatctctt

SEQ ID NO: 297 - DNA, 21 bp, Phyllotreta cruciferae
aaagaacatttccaaagctga

SEQ ID NO: 298 - DNA, 20 bp, Phyllotreta cruciferae
tgctgacaaagttacagagg

SEQ ID NO: 299 - DNA, 20 bp, Phyllotreta cruciferae
caatttccggtaggtcgtat

SEQ ID NO: 300 - DNA, 20 bp, Phyllotreta cruciferae
attatgaacagcgacgatga

SEQ ID NO: 301 - DNA, 20 bp, Phyllotreta cruciferae
accgataaagagaaaagccc

SEQ ID NO: 302 - DNA, 20 bp, Phyllotreta cruciferae
caagaaggccgtagtcatta

SEQ ID NO: 303 - DNA, 20 bp, Phyllotreta cruciferae
cgctatgataaactcaagcg

SEQ ID NO: 304 - DNA, 20 bp, Phyllotreta cruciferae
acgccgagactctacttata

SEQ ID NO: 305 - DNA, 20 bp, Phyllotreta cruciferae
tcgaaatagctggtgtcaaa

SEQ ID NO: 306 - DNA, 20 bp, Phyllotreta cruciferae
cggttacttgataccgctta

SEQ ID NO: 307 - DNA, 20 bp, Phyllotreta armoraciae
tgagttttctgttcgggaat

SEQ ID NO: 308 - DNA, 20 bp, Phyllotreta armoraciae
tacgagactcgaccaaaatc

SEQ ID NO: 309 - DNA, 20 bp, Phyllotreta armoraciae
ccgtgcaattccaacaattt

SEQ ID NO: 310 - DNA, 20 bp, Phyllotreta armoraciae
ctgtagcacctcttggaaat

SEQ ID NO: 311 - DNA, 20 bp, Phyllotreta armoraciae
catagcgtcttccttggtta

SEQ ID NO: 312 - DNA, 20 bp, Phyllotreta armoraciae
cccagtagtgtctcatacct

SEQ ID NO: 313 - DNA, 20 bp, Phyllotreta armoraciae
caatgtgttccatcaacgtt

SEQ ID NO: 314 - DNA, 20 bp, Phyllotreta armoraciae
cacagcagtttggatttctc

SEQ ID NO: 315 - DNA, 20 bp, Phyllotreta armoraciae
caagatgttttggatcacgg

SEQ ID NO: 316 - DNA, 20 bp, Phyllotreta armoraciae
tgagcaattgtaacaccaga

SEQ ID NO: 317 - DNA, 20 bp, Phyllotreta armoraciae
tccgctaatttgtgagtcaa

SEQ ID NO: 318 - DNA, 20 bp, Phyllotreta armoraciae
ggaaccgaatctttgaatcg

SEQ ID NO: 319 - DNA, 20 bp, Phyllotreta armoraciae
tcttcctcttcatcggatct

SEQ ID NO: 320 - DNA, 20 bp, Phyllotreta armoraciae
gcgctttttcaatgaaacac

SEQ ID NO: 321 - DNA, 20 bp, Phyllotreta armoraciae
cgaaggtatcagagacttcg

SEQ ID NO: 322 - DNA, 20 bp, Phyllotreta armoraciae
gtgagcagagaacgatatgt

SEQ ID NO: 323 - DNA, 20 bp, Phyllotreta armoraciae
ggcaggagatctttgatagg

SEQ ID NO: 324 - DNA, 20 bp, Psylliodes chrysocephala
tttggaaggaatcggttcat

SEQ ID NO: 325 - DNA, 20 bp, Psylliodes chrysocephala
tggatacgtgattcaaccaa

SEQ ID NO: 326 - DNA, 18 bp, Psylliodes chrysocephala
caccagctccacctttac

SEQ ID NO: 327 - DNA, 20 bp, Psylliodes chrysocephala
ttagtggacaaaactgcagt

SEQ ID NO: 328 - DNA, 20 bp, Psylliodes chrysocephala
tacattgaatccaggtcgtc

SEQ ID NO: 329 - DNA, 20 bp, Psylliodes chrysocephala
cttactctgagaccccagta

SEQ ID NO: 330 - DNA, 20 bp, Psylliodes chrysocephala
attgatccagacgcgaaata

SEQ ID NO: 331 - DNA, 20 bp, Psylliodes chrysocephala
taatagtcgaacggcagttt

SEQ ID NO: 332 - DNA, 26 bp, Psylliodes chrysocephala
ggtagttcttgtgtatttcaggcttg

SEQ ID NO: 333 - DNA, 20 bp, Psylliodes chrysocephala
ccaattgcaaatgcctgggg

SEQ ID NO: 334 - DNA, 20 bp, Psylliodes chrysocephala
ggtgtaggttccaattccat

SEQ ID NO: 335 - DNA, 22 bp, Psylliodes chrysocephala
tacgtttgggtagtgggaaacg

SEQ ID NO: 336 - DNA, 20 bp, Psylliodes chrysocephala
ttcttcctcttcattgggtc

SEQ ID NO: 337 - DNA, 20 bp, Psylliodes chrysocephala
gcttaattgttgagcacgtt

SEQ ID NO: 338 - DNA, 20 bp, Psylliodes chrysocephala
tccagggaaggaattagaga

SEQ ID NO: 339 - DNA, 20 bp, Psylliodes chrysocephala
attcatctcgttttgttcgc

SEQ ID NO: 340 - DNA, 20 bp, Psylliodes chrysocephala
gcgatgagttctgatacctt

SEQ ID NO: 341 - DNA, 20 bp, Phyllotreta nemorum
tcttctgctcgggaataaag

SEQ ID NO: 342 - DNA, 20 bp, Phyllotreta nemorum
tggatacgagactctaccaa

SEQ ID NO: 343 - DNA, 20 bp, Phyllotreta nemorum
aatttggaaaggtcgaaacg

SEQ ID NO: 344 - DNA, 20 bp, Phyllotreta nemorum
tgatatagcggctaaagaac

SEQ ID NO: 345 - DNA, 20 bp, Phyllotreta nemorum
catagcgtcttccttggtta

SEQ ID NO: 346 - DNA, 20 bp, Phyllotreta nemorum
tatccttttgtctgttcaag

SEQ ID NO: 347 - DNA, 20 bp, Phyllotreta nemorum
tttcgtagttttcgagctgc

SEQ ID NO: 348 - DNA, 20 bp, Phyllotreta nemorum
ccaacgtatttgttgtaggc

SEQ ID NO: 349 - DNA, 20 bp, Phyllotreta nemorum
gccttgttcatatcctcgat

SEQ ID NO: 350 - DNA, 20 bp, Phyllotreta nemorum
ccaattgcaaatgtcttgga

SEQ ID NO: 351 - DNA, 20 bp, Phyllotreta nemorum
atgtggctacatggaattgt

SEQ ID NO: 352 - DNA, 20 bp, Phyllotreta nemorum
cgtacctcaaccaaatacca

SEQ ID NO: 353 - DNA, 20 bp, Phyllotreta nemorum
tcttcctcttcatcggatct

SEQ ID NO: 354 - DNA, 20 bp, Phyllotreta nemorum
atgaaacaccatgggctatt

SEQ ID NO: 355 - DNA, 19 bp, Phyllotreta nemorum
gtatcagagacttcgcctc

SEQ ID NO: 356 - DNA, 20 bp, Phyllotreta nemorum
acaacttttcccccttgaat

SEQ ID NO: 357 - DNA, 20 bp, Phyllotreta nemorum
gcattgtttcaccactttca

SEQ ID NO: 358 - DNA, 20 bp, Phyllotreta striolata
catttcaagttccttagcgt

SEQ ID NO: 359 - DNA, 20 bp, Phyllotreta striolata
atttccagttaggggctaag

SEQ ID NO: 360 - DNA, 20 bp, Phyllotreta striolata
ctactttagaaccgccttca

SEQ ID NO: 361 - DNA, 20 bp, Phyllotreta striolata
gtagacaaaacagccgtagc

SEQ ID NO: 362 - DNA, 20 bp, Phyllotreta striolata
attccgtcgtatttctgttg

SEQ ID NO: 363 - DNA, 20 bp, Phyllotreta striolata
tcttggacacaccaacagta

SEQ ID NO: 364 - DNA, 20 bp, Phyllotreta striolata
tacgcagcaagatcgtagta

SEQ ID NO: 365 - DNA, 20 bp, Phyllotreta striolata
ttggtaacagccttagttcc

SEQ ID NO: 366 - DNA, 20 bp, Phyllotreta striolata
tgactttggatagccttgtt

SEQ ID NO: 367 - DNA, 20 bp, Phyllotreta striolata
cgatcgtaactccagaaagt

SEQ ID NO: 368 - DNA, 20 bp, Phyllotreta striolata
gtagagtgcgttctgatcat

SEQ ID NO: 369 - DNA, 20 bp, Phyllotreta striolata
gaagtatgttctgggtttgc

SEQ ID NO: 370 - DNA, 20 bp, Phyllotreta striolata
cctttcttcgaatttcacac

SEQ ID NO: 371 - DNA, 20 bp, Phyllotreta striolata
acgtaatctagcgtgtccat

SEQ ID NO: 372 - DNA, 19 bp, Phyllotreta striolata
gacggtatcagagacttcg

SEQ ID NO: 373 - DNA, 20 bp, Phyllotreta striolata
acaacttttcccccttgaat

SEQ ID NO: 374 - DNA, 20 bp, Phyllotreta striolata
gcacgatcttcttcatctct

SEQ ID NO: 375 - DNA, 20 bp, Phyllotreta atra
agttttctgttcgggaatga

SEQ ID NO: 376 - DNA, 20 bp, Phyllotreta atra
acgagactctaccaagatca

SEQ ID NO: 377 - DNA, 20 bp, Phyllotreta atra
tatccctctggcctatctac

SEQ ID NO: 378 - DNA, 20 bp, Phyllotreta atra
ctttagtggacaaaacagcc

SEQ ID NO: 379 - DNA, 20 bp, Phyllotreta atra
tcatagcgtcttctttggtc

SEQ ID NO: 380 - DNA, 20 bp, Phyllotreta atra
cccagtagtgtctcatacct

SEQ ID NO: 381 - DNA, 21 bp, Phyllotreta atra
ttaacgcaaatcgggactctc

SEQ ID NO: 382 - DNA, 20 bp, Phyllotreta atra
cacagcagtttggatttctc

SEQ ID NO: 383 - DNA, 20 bp, Phyllotreta atra
caagatgtttcgaatcacgg

SEQ ID NO: 384 - DNA, 19 bp, Phyllotreta atra
tcttcttaggcagcagaac

SEQ ID NO: 385 - DNA, 20 bp, Phyllotreta atra
cgaatagctcggagatgtag

SEQ ID NO: 386 - DNA, 20 bp, Phyllotreta atra
ccttgacttgctccacttta

SEQ ID NO: 387 - DNA, 20 bp, Phyllotreta atra
gagccttcttcctcttcatc

SEQ ID NO: 388 - DNA, 20 bp, Phyllotreta atra
tttagatgacacaccgtgag

SEQ ID NO: 389 - DNA, 20 bp, Phyllotreta atra
cgatggtatcagagacttgg

SEQ ID NO: 390 - DNA, 20 bp, Phyllotreta atra
gcaacaattcttgtgctctt

SEQ ID NO: 391 - DNA, 20 bp, Phyllotreta atra
ctggaaagcgtacaaaatcc

SEQ ID NO: 392 - DNA, 20 bp, Phyllotreta cruciferae
gctctttcgaaggaataggt

SEQ ID NO: 393 - DNA, 20 bp, Phyllotreta cruciferae
ggactgtcttggtcttgtag

SEQ ID NO: 394 - DNA, 20 bp, Phyllotreta cruciferae
cgtgcaattccaacaatttg

SEQ ID NO: 395 - DNA, 20 bp, Phyllotreta cruciferae
gcacccctgggaaatttata

SEQ ID NO: 396 - DNA, 20 bp, Phyllotreta cruciferae
tcatagcgtcttctttggtt

SEQ ID NO: 397 - DNA, 20 bp, Phyllotreta cruciferae
accccaataatgacgaagac

SEQ ID NO: 398 - DNA, 20 bp, Phyllotreta cruciferae
tcaatgtgttccatcaaggt

SEQ ID NO: 399 - DNA, 20 bp, Phyllotreta cruciferae
gcacagcagtttgaatttct

SEQ ID NO: 400 - DNA, 20 bp, Phyllotreta cruciferae
gccttgttcatatcctcgat

SEQ ID NO: 401 - DNA, 20 bp, Phyllotreta cruciferae
gcgattgttacaccagaaag

SEQ ID NO: 402 - DNA, 20 bp, Phyllotreta cruciferae
attttacatttgtcggcgtc

SEQ ID NO: 403 - DNA, 20 bp, Phyllotreta cruciferae
cgtggaattgtttcacttgt

SEQ ID NO: 404 - DNA, 20 bp, Phyllotreta cruciferae
ctcttcatcgggtctttcaa

SEQ ID NO: 405 - DNA, 20 bp, Phyllotreta cruciferae
gcgttcaacgatttcttttc

SEQ ID NO: 406 - DNA, 19 bp, Phyllotreta cruciferae
cgacggtatcagagacttg

SEQ ID NO: 407 - DNA, 20 bp, Phyllotreta cruciferae
tcgccatgaactaacactag

SEQ ID NO: 408 - DNA, 20 bp, Phyllotreta cruciferae
acctatgacgtttacgatgg

SEQ ID NO: 409 - RNA, 804 nt, Phyllotreta armoraciae
auguccaaaguaaacgaaguugcugauuuauauaaacaauugaaaucagaauggaauacaaaaaacccaaacuuaaguaaaugcgagaaacuccugucucaacugaagcucgaauugaccaauuugauguuucugccaacuucaacggcaacagcuacaaagcaggaauuacuuuuagcucgcgaugucuuagaaauugguguacaauggagcguugcagccaaugacauaaccgcauucgaaagauauauggcucaauugaaaugcuacuauuuugauuacaacaaccagcuuccugagucugcguuuaaauaucaauuacuaggauugaaucuucuguuuuuauugucgcuuaacagaguggcagaauuucacacagaguuagaacuuuuaccagcugaucacauacagaacgauguguacauaaggcauccuuuaucaauugagcaauaccuaauggaaggaaguuacaauaagauauuccuugcgaaagguaauguuccugcagcaagcuacaccuuuuuuauggacauacugcuugauacgauucgaguugaaauugcggauuguuuaucaguagccuaugaaaaaauaucuguaaaagauuuuacaagaaugcucuauuugccgaaugaagaaacagcuaagaauuuugccaaaaaggcuuuucaacacaaggcuuggaaauuggaccaugacuacuucuacuuuauucccgaacagaaaacucaugaaccuauuccuucgaaagaauuggcccagcaagcaauugaauacgcaaaggaacuugaaaugauuguuuaa

SEQ ID NO: 410 - RNA, 456 nt, Phyllotreta armoraciae
augggucggaugcacgcgcccgguaaagguaucgcccagucggcccuacccuacagaagaagcgucccuacguggcugaaaguaacccccgaagaagugaaagagcacaucuucaaauugggcaagaagggccucacgccgucccaaaucggcgucauccugagggacuccuacggaguggcccagguaagguucgucuccggcaacaagauccuccgcaucaugaaggccaugggacuggcgcccgaccuacccgaggacuuguacuaccucaucaagaaagccguggccauucgcaagcacuuggagaggaacaggaaggacaaggacagcaaguuccguuugauuuuggucgagucucguauccacaggcucgccagguacuacaagaccaaaucaguccuagccccuaacuggaaauacgaaucgagcacggcuucggcucuggucgcuuaa

SEQ ID NO: 411 - RNA, 772 nt, Phyllotreta armoraciae
acgcaaaaaagguguuaaaaagaaggugauagauccuuucacgaggaaggauugguacgaugucaaggccccaucgauguucaccacgcgccaaguuggcaagaccuuggucaaccguacccaagguacuagaaucgcaucugaaggccugaaauucagagucuucgaaguuucauuagccgacuuacagaacgauaaugaugccgaaaggucuuucaggaaguuccguuugauugcugaagauguucaagguagaaacguauuaaccaauuuccaugguauggacuugaccacggauaaguugagaucgauggugaagaaauggcagacucuuaucgaagcuucugcugaugugaaaacuuccgauggguuuuugcuuaggguauuuuguauuggauuuaccaacaaagaucagcauucccaaaggaaaacgugcuaugcccagcauacacaaguuagagcuauucgcaagaagaugguggaaaucaucacccgugacauccaggguuccgacaucaaagaaguagucaacaaacuguugcccgacagcauagcuaaggauaucgagaaggccugccaagguauuuacccacuucacgaugucuacauucguaaggugaagguacucaagaagccgcguuucgaccuuuccaaauuguuggaauugcacggugacgguggcaaaggaggcgccggugacuccacuggcgaaggcgguucuaaaguagauaggccagagggauacgaaccacccguacaagagucgguauaa

SEQ ID NO: 412 - RNA, 831 nt, Phyllotreta armoraciae
augagcuccguuuuguguccggaaauaccagagccagguuuuucauucgaaaacugcaaaagaaaugccuuacuggaaagcaagggauuuuccacccccaaggcgauaaagacagguacuacaaucguagggauugucuacaaagauggugugauacuuggggcugauacucgagcuacagaagauacuacgguggccgauaaaaacugcgagaaaauccacuuuuuggcaccaaauauguauuguuguggugcaggaacugccgcagacacugaaaugaccacucaaaugguagcagcgcaacuggaauugcauaagcucuacacaaacagagaagcccgcguagcaacagcaaaucagcuccugaagcaauacuuauucaguuaccaagguuacauuggagcugcuuugauucuuggagguguagacaucgaagggccccaucugcauaugauuuauccucacgguuccaguguggauuugccuuaugcuaccauggguuccgguucauuagcugcuauaucaguguuugaguuaggcuggaagccugagaugggagaagaagagggcauucagcucguaagaaacgcuauagcugcugguaucuuuaacgauuuaggaucugguucuaacguugauguuuguaucauacgaaaaggaguaguagauuacagaaggaccuacgaugaagccaauaagaaaggagucagacaaggaucuuacaaauuuccaagaggugcuacagcuguuuugucuacuaaaguuguugauguagaggaaguuucugucauuccuauagaagcugaaagaauggauguugccgcuuuuuaa

SEQ ID NO: 413 - RNA, 576 nt, Phyllotreta armoraciae
auggcgcccguagcgaagccuaaggaaacuaaagacaaaagagaugucaaggauaaaaccaaaaaucauaugcgagaauugcauauccgcaaauuaugccuuaacauuuguguaggagaaucuggugacagacuuacucgugcugcuaagguauuagaacaacugacuggucaacagccaguuuucuccaaagccagauacaccgucaggucuuuuggaauucguagaaacgaaaaaauugcuguacacugcacaguaagaggcgcgaaggccgaggaaauauuagaaaggggcuuaaaagucagagaauacgaauugaggagggauaacuucucuaucucugguaacuucgguuuugguauccaagaacacauugaucuuggaaucaaguacgacccuagcauagguauuuacggucuugauuucuacguuguguugggucgccccgguuucaacguagcccaccgaagagcgaagaagggaaaaguugguuucucucauagguuaaccaaggaagacgcuaugaagugguuccaacagaaauacgacggaauaauuuuagcgaguaaaaaauag

SEQ ID NO: 414 - RNA, 462 nt, Phyllotreta armoraciae
augucuuugguaauuccggagaaauuccaacacauucuucguauccucgguacgaauaucgauggaaaaagaaaagugcaauucgcccucacugccauuaaagguguugguagacguuauuccaauauugucuugaaaaaggcagaugugaauuuggacaagagggccggagaauguuccgacgaagaaguugaaaaaaucauaacuauuaugucuaauccucgucaauauaaaauuccugacugguuuuugaacagacagaaggacauuauugaugguaaauacagucagcugacuucuucaagucuugacucgaaguugcgugaggauuuggaaaggaugaagaagauucgugcccacagagguaugagacacuacuggggucuucgugugagaggucaacacaccaagacuacuggacgucguggacguaccgucgguguguccaagaagaagauucgu

SEQ ID NO: 415 - RNA, 870 nt, Phyllotreta armoraciae
uccaaugcacaaaaggcucagcaauuaauagcugaagcugagaagaaaguguccucaaggggauuuuucggaucucuuuucggaggguccagucgcauugaagaugcaguggaauguuaccaaagggcugcaaauuuguuuaaaauggcgaaaaauugggaugcugcuggaaaggcuuuuugugaagcagcaaauuugcauucgagaaguggggcucgucaugaugcugcuacuaauuuuguagaugcagccaacuguuauaaaaaagcugacaucagugaggcuguuaauugcuuguugaaagcuauagaaaucuauacagacaugggaaaauuuacgauggcagccaaguaccaucaaaacauugccgaaauguacgagacugaucccguugacuuagaacgagccguucagcacuaugaacaggcugcggacuauuuccgaggagaagagagcaauucauccgcaaacaaaugucuucuaaaaguugcccaguacgcagcacagcucgaaaacuaugaaaaagcaauacaaaucuaccaagaaguagcuuuuucagcucuagagagcucucuguuaaaauacagugcuaaggaguaccuguuuagggcugcucucugccauuuauguguggauauucucaaugcccagcaugcuguagaaaguuauauucaaagguauccagcauuucaagauucccgagaauauaaauuguugaaaacguugauggaacacauugaagagcagaauguugauggauauacagaugcugucaaugauuaugauucuauuucucguuuagauccuugguauacaacaaucuugcugcguaucaaaaagcaacuuaaugagagucccgauuuacguuaa

SEQ ID NO: 416 - RNA, 372 nt, Phyllotreta armoraciae
augccaccgaaaacuaguggaaaggcagcaaaaaaggcuggaaaagcucaaaagaacauuucuaaagccgauaaaaagaagaaaaggaggaggaaggaaaguuacgcaaucuacauuuacaaaguuuuaaagcaaguacaucccgauaccgguauuuccaguaaggcgaugaguauuaugaacaguuucgugaaugacaucuucgaaagaauugccgcugaagcuucucgucuggcucauuauaacaaacguucuacuauuacuaguagagaaauccaaacugcugugcgucugcugcuucccggugaacuugccaagcacgccguuagugaaggaacuaaggcuguuaccaaguacaccaguucgaaauaa

SEQ ID NO: 417 - RNA, 354 nt, Phyllotreta armoraciae
auggcuagucaucaaagccaggguguucaacaauugcuggcugcagaaaagcgagcugcugauaaaguuacagaggcuagaaaacgcaaagccagaaggcuaaagcaggccaaggaagaagcgcaggaugaaaucgagaaguaccguaaagaaagggagcgucaauuccgcgaauucgaagccaagcacaugggcucuaaagaggauguagcuucgaagaucgaccaggacaccaagaggagaaucgaggacaugaacaaggcuauccaaagucagaaagaacccgugauccaaaacaucuuggaauugguguacgauaucaagccggaaauccacaagaauuaccguaauuaa

SEQ ID NO: 418 - RNA, 375 nt, Phyllotreta armoraciae
augucuggucgcgguaaaggugguaaaguaaagggaaaggcaaagucucguuccaaucgugccggauuacaauuucccguaggucguauucacagauuauuaaggaaaggaaauuacgccgaaagaguuggugccggugcuccgguauacuuagcugcuguaauggaauauuuagccgcugaaguauuggaauuggcagguaaugcagcucgugauaacaagaaaacaagaauaauuccaagacauuugcaauuggcaauuagaaacgacgaggaauugaauaaauuacuuucugguguuacaauugcucagggagguguccuaccgaacauucaagcaguacuucuacccaagaagaccgaaaagaaggcuuaa

SEQ ID NO: 419 - RNA, 5694 nt, Phyllotreta armoraciae
auggcugcaacagauaguaaagcuccgcuuagaacuguuaaaagaguacaguuuggaauacuuagucccgaugaaauucgucggaugucaguuacagaagggggcauccgcuuuccagagaccauggaagcgggucgccccaaaauuugcggucucauggauccaagacagggcgucaucgacagaagcucccgaugccagaccugugccgguaacaugaccgaauguccaggccacuucggccacguagauuuagccaaaccgguauuucacauuggauucauaacgaaaaccauaaaaauccucagaugugugugcuuuuucugcagcaaauugcuggucagcccuaacaauccuaaaaucaaagaaauuguaaugaagacaaagggucaaccgagaaagcgacucacguucguguaugauuugugcaaagguaaaaauauuugcgaagguggagacgaaauggaugucgguaaagagggcgaugaaaguaaaaaggccgggcacggaggaugcgguagauaucagccgaauaucaggagaauaggucuggauuuaacggccgaauggaaacacgucaacgaagauacgcaagagaagaaaaucgcucuaucggccgaaagaguuugggagauacugaaacacaucaccgacgaggaaugcuucauucucgguauggaucccaaauucgccagacccgacuggaugauuguuacaguauugccugugccuccuuuguccguacguccugccguuguuauguauggaucggcuagaaaucaagacgauuugacucacaaauuagcggauaucauuaaaucuaacaaugagcugcagaagaacgaagcugcuggugcugcugcccacauuauuacugagaauauuaaaauguuacaauuccauguagccacguugguugauaacgacaugcccgguaugccuagggcuaugcaaaaaucgggaaaaccccuaaaagccauuaaagcucgcuugaagggcaaagaagggagaauuagagggaaucuuauggguaaacgugucgauuucucggcuagaacggucauuacuccugauccgaauuugcgaaucgaucaagucggcauuccuagaagcaucgcacaaaacaugacuuucccggaaaucguuacgccuuucaauuuugacaaaaugcuagaguugguucagcggggcaauucucaauauccaggagccaaauauauuauuagagauaauggagaaagaauagauuuaagauuucauccgaaaccuucagauuuacaucugcaauggggauauaaagucgaaaggcacaucagagacggcgauuuggugauauucaaccgacaaccuacucuccacaaaaugaguaugaugggccacagagucaaaguuuuaccuuggucgacguuucgaaugaauuuaucauguacaucuccuuacaacgccgauuucgauggcgacgaaaugaauuugcauguaccacaaaguauggaaacuagagcugaaguggaaaauauccauaucacgcccagacagauuaucacaccgcaagcgaacaaacccgucaugggaauuguacaggacacguuaacagcuguuagaaaaaugaccaaacgagacguuuucaucgagaaggaacaaaugaugaauuugcuaauguuuuuaccuauuugggaugguaaaaugccucguccagcuauuuuaaaacccaaaccucuauggaccgguaaacaauuauuuucucucauuauuccuggaaacguuaauaugaucagaacgcacuccacucacccugaugaagaagacgacggucccuauaaguggauaucuccaggagauacgaaaguaaugguagaacacggcgaauuaguaaugggaauacuguguaagaaaacucuugguacaucggcagguucacuacuucacauuuguauuuuggaguugggucacgagguuugcggaagauuuuacgguaacauccaaacagucaucaacaauugguugcuacuugaaggucauaguaucgguaucggugacgcaauugccgauccucagacguacacugaaauucgaagagccaucaaaaaagccaaagaagauguaauagaggucauacaaaaagcucacaacauggaacuggaaccuacucccgguaauacguugcgucaaacauucgagaaccaaguaaacagaauauugaacgaugcucgugacaaaacuggagguucugcaaaaaaaucuuuaaccgacuacaacaauuuaaaggccauggucgugucggguucuaaagguuccaacaucaauauuucacagguuaucgcuuguguaggucaacagaacgucgaagguaaacguaucccguucggcuucagaaaacgcacauugccgcacuucaucaaagacgauuacgguccggagucgagagguuucguggaaaauuccuaucucgccggucugacucccuccgaguucuauuuccacgccaugggagggcgugaaggucucaucgauaccgccguaaaaacugcugaaacuggauacauucaacgucguuugauaaaagccauggaaagcguuauggugcauuacgaugguaccguaagaaacucgguaggucaauugauccagcugagguauggcgaagacggccuuugcggcgaaauggucgaguuucaaacuuuguccacggugaagcugagcaacaaagcguuugaaaggaaguucagauucgauccuagcaacgaacguuaccuuagaagaguuuuuaacgaagagguaaucaagcaauuaaugggauccggagagguuauuucugagcucgagagggaaugggaccaacuucaaaaggaccgggaagcucuucgacagauuuuccccagcggugaauccaaaguagugcugccuugcaauuugcaaagaaugauuuggaacguacaaaaaauauuccacauuaacaaaagggcgcccaccgauuuaucgccgcuuaggguaauacaaggcgugagggaauuguugaaaaaaugcaucauuguagcgggagaggaucguuugucgaagcaggccaacgaaaacgcgacgcuucuauuccagugucucguacgcuccacguuguguacaaaaugcguuucggaggaguucagacuuagcacggaggcguucgaaugguugauuggagaaauugagacgcguuuccagcaagcucaagugaauccuggcgaaauggugggcgcccuugccgcccaaucuuugggcgaacccgccacucaaaugacauugaacacuuuccacuuugccgguguaucaucaaaaaauguaacucucggugugccgagauugaaggaaauuauuaacauaucgaagaaaccgaaggcuccuucuuuaacuguguuuuuaacgggagccgcugcgagagacgccgaaaaagccaagaacguuuuaugucggcuugaacacaccacuuuacguaaaguuacugcgaacacugccauuuacuacgaucccgauccacagaauacagucauaccggaagaucaggaauucgugaacguuuauuacgaaaugcccgauuucgauccaacucgcauuucuccguggcugcuacguaucgaauuggacaggaaaagaaugaccgauaaaaaacucaccauggagcaaaucgccgaaaaaauuaacgccgguuucggagacgaucucaauugcauuuucaacgaugacaacgcggagaaauugguacugcgcauucguauuaugaacagcgacgacgaaaaauucggagauggagccgacgaagauguggacaaaauggacgaugacauguuucucagauguaucgaggcuaacaugcugagcgacaugacgcuccaggguaucgaagccauuucgaaaguuuacaugcauuuaccacaaaccgacucgaagaaacguauaguaaucaccgauacaggcgaauucaaggcuaucgcugaaugguugcucgaaacagacgguacaaguaugaugaaaguacuuuccgaaagagacguagaccccgucagaacguuuucgaacgauauuugcgaaauauucucgguguugggaauagaagccguucgaaaaucaguugaaaaagaaaugaacgccguacuucaauuuuacggucuguacguaaacuacagacaucucgcccugcuuugugauguuaugacagccaaaggacauuuaauggccauaacucgucacgguauaaacagacaagauacgggagcgcugaugagauguucguucgaagaaaccgucgacguauugauggacgcuuccagucacgccgaaguugauccgaugagaggcguaucggaaaacauuauucucggccaauugccuaggaugggaaccggcuguuucgacuuguuauuagacgcugauaaauguaaaaugggcauaccuauaccucaagcucauaccucggaucuuaugacgucugguauguucuuuggcuccgcggcaacgccgagcagcaugagccccggcggugcuaugacuccuugggcucaggcgaauacaccuuauguaggcagcgaguggucaccacaaaauaugauggguagugguaugacuccaggaggagcagcguuuucuccuuccgcggcaucagaugcuucuggaaugucgccugcuuacggagcuuggucuccgacgccucaaucuccggccaugucuccuuauauggcgucuccucauggccaaucgccuucuuacagcccuucgaguccggcauuuauacccaccucgccgucuaugacgcccacaucucccggauauucuccgaguucuccggguuauucgccuacaaguccuaauuacaguccuacgagucccaguuacucuccaacaucuccgaguuauucaccgacgucucccagcuacagcccuacaucuccgaguuauucgccuacaucuccgaguuacaguccuacaucuccuaguuacucgccgacgucuccuagcuacaguccuacgucuccgaguuauucgccuacuucuccgagcuacaguccaacuucuccgaguuacucgccuacuucuccgagcuacaguccuacgucuccgaauuauucaccuacaucuccgaauuacagucccacaucgccgagcuauucgucgacguccccuaguuauucgccgacuucuccgagcuacagcccgagcucgccuagcuacucaccgucgucuccuagauacacuccggcuucgccuaauuauucuccgacaucucccaguuacucgccgucaucgccgcaauacucuucggccucgccgaguuacucgccuucaucgccgaaauauucgcccacgucgccgaguuauuccccgacgucuccgucguucucgggcggcaguccgcaguauucgccgacaucgccgaguuacucgccgacgucgccgaguuacucgccgucgagcccgcaacacacgccggccggcagcucgcgguacucgccgaguucgccgaauuauucgccgagcucgccgagcuacucgccgacaucgccgcaguauucgccgcgcagcaccaaauauucgccgacgucgcccacguacacuccgaccagcccgaguuacucgccggcgucgcccgcguacucgccccagccgcccagguauucgccuucgucgcccagcuauucgcccaccaguccugggcaggacaacgauuaa

SEQ ID NO: 420 - RNA, 531 nt, Phyllotreta armoraciae
augaaagcuaaaggagaguugaaagaauaugaaguuaucgggcgcaaauugcccaccgauaaagagaaaagccccccauuguauaaaaugaggauauucucucccgacccgaucguggcuaaaucgcgauucugguauuuucugagacaacuuaggaaauucaagaagaccaccggagaaaucguuucggucaagccgguaccagaaaaaaccccuaccaagaucaagaacuuugguauuuggcugagguacgauucccguuccgguacacauaacauguacagggaauacagggaccuuagcguuucuggagccguaacggcuuguuauagagauaugggagcucgucaucgggcuagagcacaugcuauucagauuauuaaaguggaacaaguuaagucgagcgacaccaggaggccacaagucaaacaauuccacgauucaaagauucgguucccguugcccaaacguauccaacauaagucuaugaaccgcuucucuguccgcaaacccagaacuuacuucuuguaa

SEQ ID NO: 421 - RNA, 408 nt, Phyllotreta armoraciae
auggguaaaauaaugaaaucugguaaagucguauugguccucggcggccgauacgcgggaaagaaagccgucgucauuaaaacaugcgaugauggcacgucugacaaacaauacggacaugcuuuagucgcugguauugacagguaucccaggaaaauccacaagcguauggguaaaggaaaaaugcacaaaagguccaaaaucaagccuuuuaucagaauuuuaaacuacaaucacuugaugccuaccagguauucgguagauuuagcuuccgauuuaaaagugacuccuaaagaccugaaagauccgaugaagaggaagaaggcgcguuuccagacccgcgugaaauuugaagaaagguacaagcagggcaagaacaagugguucuuccagaaauugcgguucuag

SEQ ID NO: 422 - RNA, 405 nt, Phyllotreta armoraciae
auggcuauaagaccaguuuaccgacccaaaaucgucaagaagaggacgaagaaguucauaaggcaucaguccgacagguacucgaagcuaaagcgcaacuggcguaaacccaaggguauugacaacagguuaagaaggagauccaagggccaauauuuaaugccaaauauugguuauggaucagcaucuaaaacuaggcacaugcuaccuacagguuuuagaaaaguguugguacacaacguuaaggaacuagagguucuccuccugcaaaaucguaaauacugugcugaaaucgcccaugguguuucauugaaaaagcgcaaagauaucguugaacgugcucaacaauugagcauucgagucaccaauggacacgcuagauuacguagccaagagaaugaguaa

SEQ ID NO: 423 - RNA, 420 nt, Phyllotreta armoraciae
auggcgaacacgaacaccgauuuaaucgaagaagacgccgccgacuugcaguuccccaaagaauucgaaaacgcugaaacucugcuuauaucugaagugcacaugcuguuggagcaccguaaagagcaaaacgaaucucuggaggacgaacaagaauuuucggauguguucaugaaaacucugacuuacacggacagauuuagaaaauucaagaacaaagaaaccauaucggccgugagaaauuuauugaugcagacgaaaaaacuccacaaguucgagcuggcagccauagcgaauuugugcccggagaccaccgaagaggcgaagucucugauaccuucgcuggagggccguuuggaagacgaggagcuccagucgauuuuggacgauauucaaacgaaaaggagcauacaguacuaa

SEQ ID NO: 424 - RNA, 1722 nt, Phyllotreta armoraciae
augucuuauaaaagaaaagcggagucgcaaauucccgcugaagagagcgaucaacugauaauaagaccacugggagccggccaagaagugggaagaucuugcauuaugauugaauuuaaaggaaagaaaaucauguuggauugcggcauacaucccgggcuauccggaauggacgcuuuaccguucguugacuuaauugaagccgaugaaauugauauacuccuuauaucucauuuucaucucgaucacaguggagcuuugccuugguuucugcuaaaaaccagcuucaaaggccguuguuucaugacucacgcaacaaaagccaucuacagguggcuguuguccgauuacaucaaagucaguaauauugccacggaacaaauguuauacacggaggccgauuuagaagccaguauggauaaaauagaaacgauaaauuuccacgaagaaaaagacguauugggcguuaaauuuugggcuuacaaugccggacacguacugggagcugccauguucaugaucgaaauagccgguguuaaaauauuguauacaggagauuuuucucgacaagaagacaggcauuugauggcugcagaaauacccacgauacauccagacguauuaauaacggaaucuacuuaugguacacauauucaugagaaaagggaagaucgcgaaacucguuuuacaacauuagugcacgauaucguaaauagagguggaaggugucucauaccgguauucgccuuaggaagagcccaggaauugcuacuuaucuuagaugaauauuggagucaacaucccgaacuccacgacaucccgauuuauuacgcuucaucguuagcgaagaaaugcauggccguguaucagacuuacauaaacgcgaugaacgacaaaaucaagcgacaaauagcgauuaacaauccguuuguauucaaacauauaucuaacuugaaggguauugaucauuuugaugauauuggaccaugcguagugauggcauccccggguaugaugcaaagcgguuuguccagagaacucuucgaaaccugguguacggacgcaaagaauggaguuaucauagcagguuacugcguggaaggaacguuagccaaaacgauauuaucagaaccagaagaaaucacgaccauggucgggcaaaaauugccuuuaaaaauguccguugauuacauaucguucucugcucacaccgauuaccaacagaccagcgaauucauacgaauauugaaaccuccucaccuaguguuaguucacggugaacaaaacgaaaugaaucgcuugaaagcggcccugcaaagggaauacgaagacgacagcaacacuaccauuaacauauacaacccgaggaacacgcauucaguugaauuguacuucaggggcgagaaaacggcgaaagugaugggacaacuggccgucgaugagccgcaaacgggcaaaacucugaacggcauauuggugaaaaggaauuucaauuaccacguucugucgccugaagauuuacccaguaagcuuauucucgacguucgucgaauucgcgugaugcauuuaauuugcagaauacaccgauuugaauauaagccaaauacugcaaaggcagaguuugcauuauucuggcaacagcgcgguuuugagguacaugauaucccaaguagccggucuguuggaauccauagauggggagaagaaaaugcgcgcauuuaa

SEQ ID NO: 425 - RNA, 3993 nt, Phyllotreta armoraciae
auggacaacauuccgcguacgcacgaagauaucgaggcgcaaauacgcgacauacaaucgaagaagaaagaggccgaaaaggcguccgaaucgccgcccgaaaaaguggcgaaacugggcgaaggcgguuacuucgacagcgacauauacgaaggcaagggcaaguacgaaggguacguaacaucgauagcagccaacgaugaagucgacgaugaggaagaagacgucgguuacacgcacaaaagaccaggacucggagcccccguggcccuucugaacgaugucgcucaaagugauaaagauuacgauccguucgcagaccgccgaagaccuaccauagcggauagggaagaugaguauaggcaaaaaagaagaagaaugauuauuucaccggaaagaguggauccuuuugcugacgguggaaaaacgcccgauguccaagcgagaaauuacucgaaaauuaugaaagagcaaaugcugaaaggcgaagaauuggagcuucguaaaaaaaucauagaaaaauccaaggacggcucgcugaagacgaccaauggcgauucaaccaaaucagcggcgccgaagaaaaggggccgaugggaccagaccgucgacgacgcggucguaccgcaaaaaaagaaaacccucagcguuucgacgagcaguagcgccgcgacgcccgucugggaaggagacaaaacaccggccgacauacguugggacgaaacgccgggucacaagggcagugaaacgccgggcgcgacgcccggccaaucgacgcguaugugggacgccacgccgggaccggcgacgccgggcagagaaacgcccggucauucgggcgacaagagcacgucgagacgaaaccguugggacgagacgcccaaaaccgaacgcgaaacgcccggucauucgagcgguugggcugaaacuccucgaacugauagaaucggggccgauuugauacaggaaacuccgacuccaggugcuucgaaacgucguucuagaugggacgagacgccuucggcgacucccucgcaggccaugacaccuggugcuaugacuccuagcacuccucacgguaccccgcacgcuacaccgacucacggucacgcuacuccucugcuaaccccagguggcucgacucccguaggagcaaaggccaugucgauggcgacuccuacgccgggucacuuagcuucgaugacgcccgaacaacuccaggcguacagaugggagcgagaaaucgacgaacgcaaucgaccguacuccgaugacgagcucgacgcaauguucccgcccggcuacaaaauucuuccuccuccggccggcuacguacccaucaggacgccggccagaaagcugacggccacuccgacgccgcuggugggcggcaccccgaccggauuuuucauacagcaggaggauaagagcgcaaaguacauggacaaccagcccaaagggcagaauuugccguucaugaagccagaagaugcccaauauuucgauaaguugcucguggaugucgacgaggacgcgcucgcucccgaagaacaaaaagaacguaaaaucaugaaguuguuguugaaaauuaagaacgguacgccgcccaugcguaaagcugcccuacgacagauuaccgauaaagcuagagaguuuggagcugggccguuguucaaucaaauccugccgcuguugaugagccccacguuggaagaucaagagagacauuugcugguuaaaguaaucgauaggauuuuguacaaacuggacgauuugguuagaccuuauguacacaaaauucuaguagucaucgaaccguuguugaucgaugaggauuauuacgcgcgcguagaaggucgugaaaucaucucuaaucuagcuaaagccgcuggauuggcgacuaugauuuccacaaugcguccugauauagauaacauagaugaauacguacguaauacgacagcuagagcauucgcugugguagcuucggcuuugggaauucccucuuugcugcccuuucugaaagccguauguagaucgaagaaaucguggcaagcuagacacaccggcauuaaaauuguacaacaaaucgccauauugaugggcugcgcgauuuugccucacuugaaaagcuugguggaaauuauagagcacgggcuagucgaugaacagcaaaaaguucguaccauuacggcuuuggguauagcugcuuuggccgaagcugcuaccccguacgguauagaaagcuucgauuccguauugaaaccgcuuuggaaagguauaaggacucacaggggcaaaggacuggccgcuuuccucaaagcuauagguuacuugauaccucuuauggacucggaauacgccaauuauuacacgagagaaguaauguugauuuugaucagggaauuccaaucgcccgaugaggaaaugaagaaaaucgugcugaaaguggugaagcaauguuguucgaccgacggugucgaaucgcaauacauaaaagaagaaauccugccacaguuuuucaagcauuucuggaaccacaggauggccuuggacaggaggaacuacaggcaauuggucgauacuacaguggagauugcgaacaaagugggagcuucggagauuaucaauagaauaguggacgaucugaaagacgaaaacgaggcguauagaaagauggugauggagagcauagagaagauuauggggaaucucggagcagccgauguggauuccagauuggaggagcaauugauugaugggauuuuguacgcuuuucaagagcaaacuaccgaggauguggugauguugaauggauucgguacgaucgucaaccaauuggguaaacguguaaaaccuuauuuaccacaaauuugcgguacuaucuuauggcguuugaacaacaaaucagccaaagugcgucaacaggcugcagauuugauaucccgcauagccguaguaaugaaaaccugccaggaggagaagcuaaugggccauuugggugugguccucuacgaguaucucggagaggaguacccggaaguuuuagguuccauuuugggcgcguuaaaagccaucguaaacguuauaggcaugacuaaaaugacgccgccuaucaaagaucuccugcccaggcucacgccgauccucaagaaucgccacgaaaaaguccaagaaaauuguaucgaucuugugggccggauagccgauagaggacccgaauauguaucggcacgcgaauggaugagaaucuguuucgagcuguuagaacugcucaaagcccauaaaaaggccauucgaagagcuacugugaauacuuucgguuacauagccaaagcuauugggccacacgacguuuuggccacguugcugaauaaccucaaaguacaagaacgucaaaauagagugugcaccacagucgcuauagcuauuguagcggaaacuugcucgccuuuuacggugcuaccggcuuugaugaacgaauacagggugcccgaauugaacgugcaaaacgggguguugaaaucucugucuuuucuguucgaauacaucggggaaauggguaaggauuacauuuacgcuguggcgccguugcuggaggacgcucugauggauagagauuugguacacaggcaaaccgcuugcgcugccaucaagcacaugucucuaggaguguacggauuugguugcgaggacgcucuggugcaucuuuugaacuacguguggccgaacauauucgaaacgucgccucacuugguacaggcuuuuauggacgccaucgaaggcaugcggguggcauugggaccgguuaaaauucugcaauacacucugcaggggcuguuucaucccgccaggaaggucagggacgucuacuggaagauuuacaauuccuuauauaucggaggccaggaugcucuugucgcagguuauccuaggaucaugaacgaucccaaaaaucaguacguuagauacgaauuggauuauauauuguga

SEQ ID NO: 426 - RNA, 804 nt, Psylliodes chrysocephala
augucuaaaguaaacgaaguagcugauuuauauaaacaguuaaaauccgaauggaacacaaaaaaucccaauuuaagcaaaugugagaaguuucugucacaguugaagcuugaauugacacauuugauguuuuuaccgacaucuacagcuacagcaaccaagcaagaacuucuuuuagccagagauguguuagagauuggaguucaauggaguauagcugcaaaugauauaacggcuuuugaaagauauauggcucaacuaaaaugcuauuauuuugauuacaauaaccaacuuccagaaucugcauuuaaauaucaauuauuggguuuaaauuugcuguuuuuguugucccaaaauagaguagcugaauuucauacagaauuggaguuguugccaucugaucauauucagaaugauguuuauauaaggcauccauugucuauugagcaauauuuaauggagggaaguuauaauaaaauauuucuugcgaaaggcaauguaccugcagcuaacuacaacuuuuucauggacauauugcuggauaccauaagaguugaaauugcagauugcuugucaguggcuuaugaaaagauaucagugaaggauauugcuagaaugcuguaccugccuaaugaagaggcagcgaagaauuucgccaaaaaggcuuuccaaaauaaggcuuggaaauuaaacaaugaauuuuuccauuuuauuccugaagaaaaaacucaugaaccgauuccuuccaaagaauuggcacagcaagcaauagaauaugccaaggaacuugaaaugauuguuuaa

SEQ ID NO: 427 - RNA, 456 nt, Psylliodes chrysocephala
augggucguaugcacgcaccugguaaagguauugcccaaucggcauuacccuacagaagaagugucccuacauggcucaaaguaacucccgaggaaguuaaggaccacauuuucaaguuaggaaagaaagguuugaccccaucacaaauugguguaauccucagggauuccuaugguguagcccaaguaagauuuguuucuggaaacaaaauuuugcgaauuaugaaggccaugggauuagccccugaucuaccagaagauuuguacuaccuuaucaaaaaggcuguagcuauccgcaagcauuuggaaaggaauaggaaggacaaggacagcaaauuccguuuaauuuugguugaaucacguauccaccguuuggccagguacuacaagacuaaaucaguucuugcucccaacuggaaguacgaaucuaguacagccucugcuuugguugcuuaa

SEQ ID NO: 428 - RNA, 807 nt, Psylliodes chrysocephala
auggccgucgguaaaaauaaggguuugucgaaaggaggcaaaaagggaguuaaaaagaagguaguugacccuuucacaagaaaagauugguacgauguuaaggccccaucgauguuugccacccgacaaguuggcaaaacuuuaguuaaucguacccaagguaccaaaauugcaucugaagguuugaaauucagaguuuuugaaguaucuuuagccgauuuacaaaaugauaaugacgcggaaaggucuuucaggaaguuccgucuuauugcugaagacguucaagguaggaauguuuuaacaaauuuccaugguauggauuugacaacugacaaguugagguccaugguaaagaaauggcagacucuuauugaggcaucugcugauguuaaaacgucugaugguuauuugcuuaggguauucugcauugguuucaccaacaaagaucagcuuucacaaaggaaaacguguuaugcccagcauacacaagucagagcuauccgcaagaagauggucgaaauuaucacccgcgacauccaaggcucagacaucaaggaagucguuaacaaacuccuucccgacagcauagccaaggauauugagaaagccugccagggcaucuacccccugcacgauguguacauucgcaaagugaagguacugaagaagccccguuucgaacuuuccaaauuguuggaauugcacggagacggcgguaaagguggagcuggugacgucggcggcgaggccgggucuaaggucgacaggccagagggauacgaaccaccuguacaagaaucgguuuaa

SEQ ID NO: 429 - RNA, 825 nt, Psylliodes chrysocephala
augagcuacguucuuugcccagagauaccagcuccugguuuuucuuucgauaauuguaaaagaaaugcuacacuggaaagcaaaggauucgcuguaccgaaagcaauaaaaacugguacaaccauuguaggaauaacuuauaaagauggaguuauacuuggagcugauacucgcgcaacagaagauaccacuguugccgacaagaacugcgaaaaaauucacuaucuggcaccuaauauguauuguugcggagcuggaacugcugcagauacugaaaugacaacucagaugguagcagcacaauuggaguugcacaaacuuuauacaaauagggaaucuagaguugcaacugccaaucaacuuuuaaaacaguacuuauuuaguuaucaagguuauauaggagcugcuuuaauucuaggaggaguggauauagaaggcccccauuuguacaugauucauccucaugguucuaguguggaucuaccauacggaaccaugggaucuggaucauuggcugcuauagcaguauuugaauuggguuggaagccugauauggaggaagaagcaggaguucaacuuguaagagaugcuauagcugcugguauuuucaaugacuuaggaucugguucuaauguugauauuugcguuauucgcaaaggaucaguagauuacaagaggacauaugacgaggcaaauaaaaaaggugugaaacaaggaucauacaaauaucccagagguacuacugcaguuuuguccacuaagguuuuagauguagaggagguaucuguaacucccauagaggccgaaaggauggacguuguuuag

SEQ ID NO: 430 - RNA, 582 nt, Psylliodes chrysocephala
auggcgcccguagcgaagccaaaggaugcuaaagauaaaagagauguuaaagauaaaaccaaaaaccacaugagggaauugcauauccgaaaacuaugccuaaacauuuguguuggagaaucuggugacagacuuacucgugccgcuaagguauuggaacagcucacaggccaacaaccaguauucucaaaagccagauacacugucaggucuuuuggaauucguagaaaugaaaaaauagcuguacauugcacagucagaggugccaaggcugaagaaaucuuggaaagggguuuaaaaguuagagaauaugaauugagaagagauaacuucucagcaucugguaauuuuggauuugguauccaagaacacauugaucuugguaucaaauaugacccuaguauagguauuuauggucuugacuucuauguuguauugggacgaccuggauucaauguagcccacaggagagcaaagaggggaaaaguuggauuuucucacagguugacuaaagaagaugccaugaagugguuccaacagaaauaugaugguauaauuuuagcaaguaaagccaaaaaauaa

SEQ ID NO: 431 - RNA, 459 nt, Psylliodes chrysocephala
auggcuuugguaauaccagagaaguuccaacacauucuucguauccuugguacgaauaucgaugguaagaggaaggugcaauucgcccuuacggcgauuaaggguguugguagacguuauuccaauauuguauugaaaaaggccgaugucaacuuagacaaacgugcuggagaauguucugaagaggaaguagaaaaaauuauuacaauuaugucuaacccucgucaauacaaaaucccugacugguucuugaacagacagaaagauauaauugaugguaaauauagucaguugacuuccucgagucuugauucgaaacuccgugaagauuuagaaaggaugaagaagauccgugcccacagagguaugagacauuacuggggucucagaguaagaggucaacacaccaaaacuacuggacgucguggacguacuguugguguauccaagaagaaguaa

SEQ ID NO: 432 - RNA, 876 nt, Psylliodes chrysocephala
augucuucuaauguacaaaaagcgcagcaacuaauggccgaggccgagaagaaaguuuccucaaggggauuuuucgguucucuuuuuggugggucaagccguauugaagaugcaguggaauguuaccaaagggcugcaaaccuuuuuaaaauggcuaaaaguugggauucagcaggaaaagcuuuuugugaagcagcaaauuugcauucaagaaguggugcucgucacgaugcugcuacaaauuauguagaugcagcaaauuguuauaaaaaggcugacauuaaugagucuguaaacugcuuguuaaaagcaauagaaaucuacacagauauggguagauucacaauggcagcaaaacaucaucaaacaauugcugaaauguaugagacugacucugucgaccuagagagggcuguucaacacuaugaacaagcagcagacuacuuuagaggugaagaaagcaauucaucugcuaauaaaugccuucuaaaagucgcccaguaugcugcccaacuugaaaauuaugaaaaagcaauacagauauaccaagaaguggcuuauucagcauuggagagcucucuauugaaguacagugccaaagaguaucuguuuagggcugcccuuugucacuuauguguggauguucucaaugcccagcaugccauagaaaguuauauacaaagguacccagcuuuccaagauucaagagaauacaaguuauugaaaucacugauagaacacauugaagaacagaauguugaugguuacacagaugcugugaaggacuaugauucuauuucgcgucuggaucaaugguacaccacaauccuguuacguauuaaaaaacaacugaaugagagcccugauuugcguuaa

SEQ ID NO: 433 - RNA, 372 nt, Psylliodes chrysocephala
augccgcccaaaacaagugguaaagcugcgaaaaaggccggcaaggcccaaaagaauauuucuaaaaccgauaagaaaaagaagcgcaggaggaaggaaaguuaugccauuuacauuuacaaaguuuugaaacaaguucaucccgacacuggaauuucgaguaaggcuaugagcauuaugaacaguuucguaaacgauaucuucgaacguauugcugcugaagcuucucgucuugcacauuacaauaaacggucuacaauaacuaguagagaaauccaaacugccguucgacuauuacuuccuggugaauuggcaaagcacgcaguaagugaagguaccaaagccguuacuaaauacaccaguuccaaauaa

SEQ ID NO: 434 - RNA, 354 nt, Psylliodes chrysocephala
auggcaagccaucaaagccaugguguucaacagcuuuuagcagcugaaaaacgcgcugcagacaaaguuacagaggcuagaaaacgcaaagcuaggaggcuaaagcaagcuaaagaagaggcucaagaugaaaucgaaaaauaccguaaggaaagggaacgccaauuucgcgaauucgaggcuaaacauaugggcucuaaagaggauguugccgcaaaaauugaaguagacacaaagcguaggauugaagaaaugaauaaggcuaucauaagucaaaaggaaccaguuauacuagaaauuuugaaacuggucuaugauaucaagccugaaauacacaagaacuaccgccaauag

SEQ ID NO: 435 - RNA, 375 nt, Psylliodes chrysocephala
augucuggacgugguaaagguggaaaaguaaagggaaaggcaaagucccguucaaaucgugcaggauuacaauuuccaguuggucguauucaucguuuauuaagaaagggaaauuaugcagaaagaguaggagcuggugcaccuguauauuuagcagccguaauggaauauuuggcugcugaaguucuagaauuggcugguaaugccgcuagagauaauaagaagacucguauuauccccaggcauuugcaauuggccauaaggaacgacgaagaauugaauaaauugcuuuccggaguuacaauugcucaaggugguguuuuaccaaacauucaagcuguacuucugccaaagaagacugaaaagaaagccuaa

SEQ ID NO: 436 - RNA, 5694 nt, Psylliodes chrysocephala
auggcugcgacagauaguaaagcuccucuucgaacuguuaaaagagugcaauuugggauacuuagcccagaugaaauucgacgaaugucaguuacagaagggggcauccgcuuuccagaaaccauggaagcuggucgccccaaauuguguggacuuauggacccacgacagggugucauagacagaaguucuaggugucagacuugugcugggaacaugacugaguguccuggucauuuuggacacauagauuuagcaaaaccuguuuuucacguaggguuugucacuaaaaccaucaagauuuugagaugcguuuguuucuucugcaguaaauuauuagucaguccgaacaauccaaaaauuaaagaaguggucaugaaauccaaaggacaaccucgaaaacgacuuaccuuuguguaugaucuaugcaaagguaaaaauauuugugaagguggagaugagauggauguugguaaagaaggagaugaaaauaaaaaagcuggacaugguggaugugguagauuccagccuaauaucaggcgagcggguuuggauuugacagcugaauggaaacaugccaaugaggauacucaagaaaagaaaauugcucucucagcugagaggguuugggaaauucuaaaacauauaacugaugaagaauguuuuauucuugguauggaucccaaauuugcuaggccugacuggaugauuguaacaguacucccugugccaccuuuaugugugcggccagcuguaguaauguuugguucagcaagaaaucaggaugauuugacucacaaauuggccgauauuauuaaaucaaauaaugauuuacagaaaaaugaagcagcuggugcagcugcucauauuaucacagagaauaucaaaauguuacaguuccauguugccacauuaguugauaaugauaugccuggaaugccaagggccaugcaaaaaucuggaaaaccccuaaaagccauuaaagcuagacugaaggguaaggaaggaagaauuagaggaaaucuuauggguaaacguguugauuucucugcacguacugucauuacaccugauccaaacuugcgaauugaucaaguaggagugccuagaagcauugcacaaaacaugacuuuuccagaaauugucacaccauuuaauuuugacaaaaugcucgaguuaguucaaaggggcaauucccaauauccuggagcuaaauauauuauuagagauaauggugaaagaauagauuuaagauuccauccaaaaccaucagauuuacaucugcaaugugguuauaaaguggaaagacacaucagagauggugacuugguaauuuuuaaccgucaaccuacucuccacaaaaugaguaugaugggucacagggucaaagugcuuccuuggucaaccuuccguaugaaucucuccuguaccucacccuacaaugcugauuuugauggugaugaaaugaauuuacacguuccucaaaguauggaaacuagagcggaaguagaaaauauucauauuacacccagacagauuauuacuccccaagcuaauaaacccgucauggguauuguacaggacacauugacagcugucagaaaaaugaccaagagagaugucuucauugaaaaggagcagaugaugaacuuguugauguucuuaccuauuugggaugguaaaaugccucgcccugcaaucuuaaaaccaaagcccuuauggacuggaaaacaauuguucucucuuaucauuccgggaaacguaaauaugauaagaacacauucaacucauccugaugaagaagacgaugguccguacaaguggauaucuccaggagauacaaaaguaaugguagagcacggcgaauuaguuauggggaucuuaugcaaaaaaacacuaggaacaucugcagguucucuucuucacauuuguauguuggaauugggacacgaaguauguggaagauucuaugguaacauccaaacaguaaucaacaacugguuguuacuggaaggucacaguauugguauuggugacaccaucgccgauccucagacauauacugaaauucagagggcgaucaaaaaggccaaagaggauguaauagagguuauucaaaaagcucauaauauggaauuggaaccuacacccgguaacacauugcgucagacuuucgagaaucaaguaaacagaauuuuaaacgacgcucgugacaaaacuggugggucugcuaagaaaucguugacugaauacaauaauuuaaaggcuaugguaguaucggguucuaaagguuccaacauuaacauuucucagguuauugccuguguaggucaacagaacguugaagguaaacguauuccauuuggcuucagaaaacguacauugccacauuucaucaaggacgauuacgguccugagucuagagguuuuguugaaaauucguaucuagcuggucugacaccaucugaguuuuauuuucacgccaugggaggucgugaaggucuuaucgauacugcuguaaaaacugccgaaacuggauacauucagcgucguuuaauaaaggcuauggagaguguuaugguacauuaugaugguacuguaaggaauucaguaggucaacucauucaguugagauauggagaggauggucuuuguggagaaaugguagaauuucagaccuuauccacugucaaguugaguaacaaagcuuuugaaagaaaguuuagauuugaucccagcaaugaacguuaucuccgaaggguguuuaaugaagaaguuaucaaacaacuuaugggaucuggagaaguaaucuccgaacuugaaagagaaugggaacaauugcaaaaagaucgugaggccuugagacaaaucuucccuaguggggaauccaaagucguacuaccuugcaauuuacaaaggaugauuuggaauguacaaaaaauuuuccauauuaauaaacgcucaccaacagacuuaucaccccuuagaguaauacagggugugcgaacacuuuuaaagaaaugcauuauuguagcaggagaggauagguuaucaaaacaagcuaacgaaaaugcuacacuucuauuccaauguuuaguacguucaacuuuaugcacaaaaugugugucugaagaauucagauugagcacugaagcuuuugaaugguugauuggagaaauugaaacuagguuucaacaagcacaagcaaauccuggagaaaugguuggcgcuauugcugcacaaucuuugggagaaccugcuacgcaaaugacacuuaauacuuuccauuuugcuggaguaucuuccaagaacguaacucuugguguaccaagauugaaagaaauuaucaauauaucaaagaagccuaaggcccccucuuuaacuguauuuuugacuggugcugcugcuagggaugcugagaaagccaagaaugucuugugcaggcuggaacacacaacucuacguaaaguaacugcaaacaccgcaauuuauuaugauccugacccgcaaaacacaguuauuccugaagaucaagaguuuguaaacgucuauuaugaaaugccugacuuugauccaacucguauuucaccuugguuacuacguauugaauuagauagaaagagaaugacagauaagaaacuuaccauggaacaaauagcagaaaaaauuaacgcugguuuuggugaugauuugaauuguaucuucaaugaugauaaugcagaaaaguuaguacuacguaucagaauuaugaacagugaugacggaaaguuuggagaaggugcugaugaggauguggauaaaauggacgacgauauguuccuuagauguauugaagcaaacaugcuuagugacaugacuuugcaggguauagaagccauuuccaaaguguacaugcauuuaccccaaacggacucuaaaaaaaggauugucauuacugauacuggagaauucaaagccauugcugaaugguuacuugaaacugaugguacaaguaugaugaaaguauuaucagaaagagauguggauccagucagaaccuucucuaaugacauaugugaaauauuuucgguauugggaauugaagcugugcgaaaauccguugaaaaagaaaugaacgcuguacuucaauucuacggucuguauguaaacuaccgacaucuugcuuuacuuugugauguaaugaccgcuaaaggucacuugauggcuaucacacgucacgguauaaacagacaagauacaggagcuuugaugagauguucuuuugaagaaacuguugacguacucauggaugcugcaagucaugcugaaguagauccuaugagagguguaucugagaauauuaucaugggucaguugccuagaaugggaaccgguugcuuugaucuuuuguuagaugccgagaaauguaaaaugggcauccccauuccacaagcgcauaguucagaucuaauggcgucugguauguucuuuggaucagcugcuaccccuagcagcaugagccccggaugcgcuaugacuccaugggcugcagcaaauaccccauauguuggcagugcuuggucuccacaaaauuuaaugggcagugguaugaccccaggaggagcggcauuuucaccuucugcagcuucagaugcuucuggaaugucaccagguuauggcgccuggucuccaacaccacaaucaccagcuaugucucccuauauggguucaccucacggacaaucuccaucuuacaguccaucuagucccgcuuuucuaccuacuuccccaucuaugacaccuacaucaccuagauauucgccaaguuccccuggauauucacccacaaguccuaauuacagccccacaaguccuagcuacucuccuaccuccccuaguuauucaccaacaucuccaaauuacagcccuacuucuccuagcuacucuccuacaucuccuaguuacaguccaacuucgccuaguuauucaccgacaucgccaaguuacaguccaacaucuccuagcuauucuccuacaucuccuaguuacaguccaacuucgccuaguuauucaccgacaucgccaaguuacaguccuacaucucccaguuauucucccacuucuccaaguuacagccccacuucaccaaguuauucaccaacuucuccaaguuacagucccacuucuccaaguuauaguccaacuucgccaaguuauucuccuucaucgccaagguacaccccagcuuccccaaguuacucuccgacaucuccgaguuauucuccuuccucgccucaauauucuccagcuuccccaaguuauucuccaucaucuccaaaauauucaccaacuucgccgaauuauucgccuacuucuccgucguucucugguggcagcccacaguauucuccaacgucaccaagcuauucaccaacuucgcccaguuacucuccaucgaguccacagcacacuccggcugguaguucacgauauucuccaucgucucccaauuauucaccuaguuccccaaguuauucaccaacuucaccucaauauuccccucacaguaccaaauauucaccuacuucaccuacuuacacuccuacaaguccgaguuauucaccugccucaccugcauauucuccucaaccgccuagguauucaccuucuucaccuagcuauucaccuacuagucccaaucaggauaaugauuag

SEQ ID NO: 437 - RNA, 531 nt, Psylliodes chrysocephala
augaaagccaaaggagaguugaaggaauaugaagucaucgggcguaaguugcccacugaaaaggagaaaaacacuccuuuauauaaaaugagaauauucucucccgauccaauuguggcuaaaucacguuuuugguauuucuugaggcaacuuaggaaguuuaagaaaacaacuggugaaaucguauccguuagacuaauaccugaaaagacuccaguuaagauaaagaauuucgguauaugguugagguaugacucccggucuggaacacacaacauguacagggaauacagagaccuuagcgucucuggagcuguaacagcuugcuauagggauaugggcgcccgccacagagcuagagcucaugcuauucaaaucaucaaaguggaacagguuaaagcaucugacaccaggaggccacaaguuaaacaauuccaugauucaaaaauucguuucccacuacccaaacguauucaacauaggucaaugaaucguuucucuguccgcaaacccagaacauacuuuuuguaa

SEQ ID NO: 438 - RNA, 408 nt, Psylliodes chrysocephala
auggguaaaauaaugaaaucagguaaagucguauugguccuugguggccgauaugcugguagaaaagcuguuguuauuaaaaccuacgaugaugguacuucggacaaacaguauggacaugccuuaguugcugguauugauagguauccaaggaaaauccacaaacguauggguaaaggcaaaaugcacaagaggucuaagaucaagcccuucaucaagguauuaaacuacaaccaccugaugccuaccagauauucuguagacuuagcaucagauuuaaaaguaacuccaaaagaacuuaaagacccaaugaagaggaagaaggccagguuccaaaccagaguuaaauuugaggaaagguacaagcaaggcaagaacaaaugguucuuccagaaauugagguucuaa

SEQ ID NO: 439 - RNA, 405 nt, Psylliodes chrysocephala
augucuauaagacccguauaccgaccgaaaauagugaaaaagaggacuaagaaguuuauuaggcaucagucugauagauauggaaaacuaaagcgcaacuggcguaaaccaaaggguauugacaauagaguaaggaggagauucaagggacaauauuugaugccaaauauugguuauggaucggccgcuaaaacuagacacauguugccuacagguuuuaggaaaguguugguucauaaugugaaggaacuagaaguucuucucaugcaaaaucguaaguacugugcagaaauugcccaugggguuucauccaaaaaacguaaagacauuguugaacgugcucaacaauuaagcauuagggugacaaauggacaugcaagacugcgcagccaagaaaaugaauaa

SEQ ID NO: 440 - RNA, 420 nt, Psylliodes chrysocephala
auggcaaauacaaacacagaucuaacagaagaagaugccgccgacuuacaauuucccaaagaauuugaaaaugccgaaacguugcuuauuuccgagguccauaugcuguuagagcauagaaaggaucaaaaugaaucugcagaagaugaacaagaauuuucggaugucuuuaugaaaaccuugacguauacugauagauuucgcaaauuuaaaaacaaggaaaccauaucggcuguuagaaauuuauuaaugcaaaccaaaaaauuacacaaauuugaauuggccgcuauugcgaauuugugcccagaaaccacugaagaggcaaaaucucuaauuccuucccuggaagggcgguuugaagacgaagaacuucaagcuauauuggaugauauucaaacgaagaggaguauacaguauuga

SEQ ID NO: 441 - RNA, 2067 nt, Psylliodes chrysocephala
auggcuuauaaaagaaaaccagauucacaaguuccagcugaagaaagcgaccaauuaauuauacgaccauuaggagcuggacaagaagucggaagguccugcauuaugauagaauuuaagggaaagaaaauuaugcuugacugugguauacauccuggauugucaggaauggaugcauuaccauuuguggauuuaaucgaagcugaugaggucgacuuucuucuuauaucacauuuucaucuugaccacaguggugcuuuacccugguuuuuacaaaaaacuaguuuuaaaggaagauguuucaugacucaugcaaccaaagcuauauacagauggcuuuuaucagauuauauuaaaguuaguaauauugcaacagaacaaauguuauacacagaagcagauuuggaagcuaguauggauaagauugaaacuauaaauuuccaugaagagaaagauauaauggggguuaaauuuugggcuuacaaugcuggacacguucuaggugcugcuauguuuauguuagaaauagcuggugucaaaauuuuauauacaggagacuuuucucgccaagaagacaggcauuuaauggcugcagaaauaccuacaguacauccugauguuuuaaucacagagucuacuuauggcacccauauucaugaaaaacgugaagaucgugaaucccguuucaccucauugguuaaugaaauuguaaauagaggugguagaugucuaauuccaguauuugcccuuggaagagcacaggaauuauugcucauauuagaugaauauuggagccugcauccagaacuucaugauauuccaauuuacuaugcuucuucuuuagcaaagaaauguauggccguguaccaaacauacauaaaugcaaugaaugauaaaauaaaaaggcaaauugcuguaaauaauccauuuguguucaaacauauuucuaauuuaaagggaaucgaucauuucgaagauauagggcccuguguggugauggcaucuccggguaugaugcaaagcggguuguccagagaacuuuucgaaacuugguguacggauguaaaaaauggcguuauaauagcggguuauuguguagaagguacuuuagcuaaaacgauauuaucagaaccugaagaaauuacaacaaugguuggacaaaaacugccucuaaagaugucagucgauuauauaucguuuucugcgcauacugacuaucagcagacgagcgaauuuauuaggcuauuaaaaccgccucauguagucuugguucacggcgaacaaaacgagaugaaucguuugaaggcggcccuccaaagggaguacgaggacgaucccaauacaacgauuaauauuuacaaucccagaaacacgcauucggucgaguuguauuuuagaggugaaaaaaccgccaaaguuaugggaaaacucgcggucgaucaaccacaagccggaaaaaccuugaaugguauccugguuaagaggaauuucaauuaucauauauugucuccagacgacuugucaaaauacacagauuuaaacaucagucagauauugcaacggcaaaguuuacacuauucuggaaacagcgguguucugagguauaugauuucgcagguagcuggucuauuagaguccauagacggagaaaagaaaaugaaagcuuuuaacgccaucgauauaacgaucgaacauaaaauugucaccuuggaaugggucgcuaacccugugaacgacauguacgcagacucgauagucgcugcuauccugcaagcagacuuauuagacguacccgugaaaaauaugacgacguccgucaaaauugacaggaugcauuucaaagagugucucauugagauguugcaagauauguucggagaagauucuguaccaaaaauauucaaaggugaaaaauuguauguaacuguuaacgauaaacgcgccgacauugaucuaacuaauuuggaaguuaaaugcgcggaagacgagacguuucaacagaucguucacacggcugugacaaaguuguaucagucguuggcgccuccucaauuugaaacggucuga

SEQ ID NO: 442 - RNA, 3984 nt, Psylliodes chrysocephala
auggaaaacauuccacgcacacacgaagauauugaggcacaaauacgggaaauacaaucuaagaaaaaagaggucccagcugauauaucuccggauaagguagcaaaauuaggcgaaggugguuuuuucgauaacgagauuuaugaaggcaaaggaaaauaugaaggguauguaacaucuauugcugcuaaugacgaaguggaugaugaugaagaggauguuggauuuucucauaaaagaacagguuuaggagcaccuguagcucuuuuaaaugauguugcucagagcgauaaagauuaugauccauuugcugaccguagaagagcaaccauugcagauagagaagaugaguacagacagaggaggagaaggaugaucauaucuccugaaagaguggauccuuuugcagaugguggaaaaacgccagacuuucaaaccaggaacuacucccagauuaugaaggagcaacuacuaaaaggggaagaaaaugagcuccgcaaaaaaauuauugaaagaucaaaggaagguacauugaaaccaacaaauggugaagcuaaaucgaccccuaagaaacguggucgaugggaucaaacuguagaugaaguuguagugccacaaaagaaaaaaaccuugagcguaucuacuagcagcgcaucugccacaccuguuugggagggagacaaaacaccggcagauauccguugggaugaaacuccaggacauaaagguagcgaaacaccgggcgcaacuccaggucagucuacaaggaugugggacucgacuccaggaccugcaacuccuggaagagaaacgacgccaggccacggaggagauaaaagcacauccagaagaaaccguugggaugaaacaccaaagaccgaacgagaaaccccuggucauuccagugguugggcugaaacuccuagaaccgaccgaacuggagcagaucuuauacaagaaacucccacuccuggcgcguccaaacgcagauccagaugggacgagacucccucugcaacuccaucgcaaguuaugacgcccggggcuaugacuccuacuacuccucauggcacuccacaugguacuccaagucacgggcauucaacuccuuuacuaacucccggaggcagcacuccaguggguguuaaagccauggcuauggccacaccuacaccaggacaccuagcaucgaugacgccugagcaauugcaagcuuauagaugggaaagagaaaucgaugagcguaaucguccauacucagacgaagaacuagaugcuauguucccuccugguuacaagguccuuccuccaccagcuggcuacauaccaauuagaaccccagcuagaaaguugacagccacgcccacuccuuuaguuggaggaacgcccacaggcuucuuuaugcagcaagaagauaaacaagcgaaauauuuggauaaccaaccaaagggacagaaccugccguuuaugaagccagaagaugcacaauauuucgacaaacuuuuaguagacgucgaugaggaagcgcuuaguccagaggaacaaaaagaacggaaaauaaugaaacuguugcugaaaaucaagaacggcacuccuccuaugcguaaagcagcuuuaaggcagauuacagauaaggcgagagaauucggugccggaccguuauucaaccagauuuuaccgcuauugaugaguccuacccucgaggaucaagaacggcauuuguuggugaaaguaaucgauaggauucuguauaaauuggaugaucuggucaggccuuaugugcacaaaauucucguuguuauugaaccccugcuuaucgacgaagauuacuacgcucguguggaaggucgugagaucauauccaaccucgccaaagccgccggucuugccacuaugaucucuacgaugagaccugauauugacaacaucgacgaguacgucagaaauacaacugcgagagcuuucgccguuguagcuuccgcuuugggaauuccuucacuguugccuuucuuaaaggccguuuguaggucaaagaaaucuuggcaggccaggcauacugguauuaagaucguucagcagaucgcuauccuuauggguugugcaauuuugccacauuugaaaucuuugguggagauuauugagcauggauugguggaugagcaacaaaaagucaggaccauuaccgcuuuggguaucgccgcccuugcugaagcagcuaccccuuacgguauugaaaguuucgacuccguacugaaaccccucuggaaagguaucagaacucaucgcgguaaagguuuggccgcuuuccucaaagcuaucgguuacuugauuccccuuauggaugccgaauaugcgaacuacuauacuagggaaguaauguugauuuugaucagagaguuucagucucccgacgaagaaaugaagaaaaucguauugaaggucgugaagcaguguuguucgacggacggugucgaagcgcaguauaucaaagaggaaauuuugccgcaauucuucaagcacuucuggaaccacaggauggcucuggauaggcguaauuacagacaacuaguagauacgaccguugagauugcuaauaaaguuggagcuuccgaaaucaucaauagaauaguggaugaucuuaaagacgaaaaugaagcguacaggaaaaugguaauggaaaguauugagaaaauaauggguaaccucggagcugcugacauugauucuagacuagaggaacaguugauugacgguauauuguacgcguuucaggaacaaacuacagaagaugucguuauguuaaaugguuuugguaccaucgucaaucaacuuggaaaacgcgucaaacccuacuuaccccaaauuugcgguaccauauuguggagauugaauaacaaaucggccaaagugagacagcaagcggcugauuuaauuucaaggauagcagucgugaugaaaacgugucaagaagaaaaacucaugggacauuuggguguuguacuauaugaguacuugggugaagaauauccagagguacuuggauccauucuuggagcuuuaaaagcuauaguuaauguuauagguaugacaaaaaugacuccacccaucaaagaucuguugccucguuugacgccaauuuugaagaacaggcacgaaaaaguccaggagaacugcauagauuugguuggucguaucgccgauagagguccagaguauguuucugcuagagaauggaugagaauuuguuuugaguuacuggaauuacucaaagcucacaagaaagcgauucguagagcuacaguaaacacuuucggauauauagccaaagcuauagguccucacgacgugcuggccacuuuacugaauaacuuaaaaguacaagaacgucaaaaccgcgucuguacaaccguagccauagccauuguagcugaaacuuguucucccuucaccguauugccagcucuaaugaacgaauaccgcguaccagaauugaacguccaaaauggaguuuugaagucacuuucuuuccuuuucgaguacauaggagaaaugggcaaggauuacauuuaugccguagcuccgcucuuagaagacgcuuuaauggacagagacuuaguucaccgacagacugcuugugcugcaauaaagcacauggcacuugguguguaugguuuugguugugaggacgcgcucguccauuuguugaacuaugucuggcccaauauauucgaaacgucgccacauuuggugcaggccuucauggacgccaucgaaggaaugcgaguagcuuuaggaccuauuaaaauucuacaauauaccuugcagggucuuuuccauccugcaagaaaggugagagauguuuauuggaaaauauacaauucuuuguacauugggggacaggacucguuagugugugguuacccgaggauagccaaugauccuaagaaucaguauauuagauaugaauuagauuauguauuguaa

SEQ ID NO: 443 - RNA, 804 nt, Phyllotreta nemorum
auguccaaaguaaaugaaguggcugauuuauacaaacaauugaaaucagaauggaauacaaaaaacccaaacuuaaguaaaugcgagaaacuccugucucaacugaagcucgaauugaccaauuugauguuucugccaacuucaacagcaacagcuacaaagcaggaauuacuacuagcucgugaugucuuagaaauugguguacaauggagcguagcagccaaugauauaaccgcauucgaaagauauauggcucaguugaaaugcuacuauuucgauuacaacaaccagcuuccagagucugcauuuaaguaccaauuacugggauugaaucuucuguucuuauugucgcuuaacagaguggccgaauuucauacagaguuggaacuuuuaccagcugaucacauacagaacgauguguacauaagacauccuuugucaauugagcaauaccuaauggaaggaaguuacaacaagauauuccuugcgaaagguaauguuccugcagcaagcuacaccuuuuuuauggauauacugcuugauacgauuagaguugaaauugccgauuguuuaucaguugccuaugaaaaaauaucugugaaagauuuuacuagaaugcucuauuugccgaaugaagaaacggcuaagaauuuugccaaaaaggcguuucaaaacaaggccuggaaauuagaccacgacuacuucuacuuuauucccgagcagaagacucaugaaccuauuccuucgaaagaauuggcccagcaagcaauugaauacgccaaggaacuugaaaugaucguuuaa

SEQ ID NO: 444 - RNA, 456 nt, Phyllotreta nemorum
augggucggaugcacgcucccgguaaagguaucgcccagucggcccuacccuacagaagaagcgucccuacguggcucaagguaacccccgaagaagucaaagagcacaucuucaaauugggcaagaaaggccucacgccgucccaaaucggugucauccugagggauuccuacggaguggcccaaguaagguucguguccggcaacaagauccuccgcaucaugaaggccaugggacuggcgcccgaccuacccgaggacuuguacuaccucaucaagaaggccguggccauucgcaagcacuuggagaggaacaggaaggacaaggacagcaaguuucgcuugauuuugguagagucucguauccaccggcucgccagguacuacaagacuaaaucaguccuagcacccaacuggaaauacgaaucgagcacggccuccgcucuggucgcuuaa

SEQ ID NO: 445 - RNA, 807 nt, Phyllotreta nemorum
auggccgucgguaaaaauaaggguuugucgaaaggaggcaagaaagguguuaaaaagaaggugauagauccuuucacgaggaaggauugguacgaugucaaggcaccgucgauguucaccacgcgccaaguuggcaagaccuuggucaaccguacccaagguaccagaaucgcaucugaaggccugaaauucagagucuucgaaguuucauuagccgacuuacagaacgauaaugacgccgaaaggucuuucaggaaauuccguuugauugcugaagauguucaagguaggaacguauuaaccaauuuccaugguauggacuugaccacagauaaguugcgaucgauggucaagaaauggcagacucuuaucgaagcuucugcugaugugaaaacauccgauggguuuuugcuuaggguauuuuguauugguuucaccaacaaagaucagcauucccaaaggaaaacgugcuaugcccagcauacacaaguuagagcuauucgcaagaagaugguggaaaucaucacccgugacauccaggguuccgauaucaaggaaguagucaacaaacuguugcccgacagcauagcuaaggauaucgagaaggccugccaagguauuuacccgcuucacgacgucuacauucguaaggugaagguacucaagaagccgcguuucgaccuuuccaaauuguuggaauugcacggcgacgguggcaaaggaggcgccggggacaccacuggcgaaggcgguucuaaaguagauaggccagaaggauacgaaccacccguacaggaaacgguauaa

SEQ ID NO: 446 - RNA, 831 nt, Phyllotreta nemorum
augagcuacacuuugugcccggaaauaccagcgccaggauuuucauucgaaaacugcaaaagaaaugccuuacuggaaagcaagggguucaccacucccaaggcgauaaagacagguaccacaaucgucgggauaguuuacaaagauggcgugauacuuggggccgauacucgagcuacagaagauaccacgguggccgauaaaaacugugagaaaauccacuuuuuggcaccaaauauguacugcuguggugcaggaacugccgcagacaccgaaaugaccacucaaaugguagcagcgcaacuggaacugcauaagcucuacacaaacagagaagcucgcguagcgacagccaaccagcuccugaagcaauauuuauucagcuaccaaggcuacauuggagccgcucucauucucgggggcguagacaucgaagggccccauuuacauaugauuuacccucacgguuccagcguggacuugccuuacgccaccauggguuccgguucuuuagccgcuauaucaguguuugaguugggcuggaagcccgagaugggagaagaggagggcauucagcucguuagaaacgcuauagcugcugguaucuuuaaugacuuaggaucugguucgaacguugauguuuguauuauaagaaagggggugguggauuacagaaggaccuacgacgaggccaauaagaaaggagucagacaggggucguacaaauuuccaagaggcgcuacagccguuuugucuacuaaaguugucgauguagaggaaguuucuguuacuccuguagaagcugaacgaauggaugugaguucgauauaa

SEQ ID NO: 447 - RNA, 507 nt, Phyllotreta nemorum
augcgagaauugcauauccgaaaauuaugccuuaacauuuguguaggagaaucuggugacagacuuacucgugcugcuaagguguuagaacaacugacuggucaacaaccaguuuucuccaaagccagauacaccgucaggucuuuuggaauucguagaaacgaaaaaauugcuguucacugcacaguaagaggcgcgaaggccgaggaaauauuagaaaggggcuuaaaagucagagaauacgaauugaggagggauaacuucucuaucucugguaacuucgguuucgguauccaagaacacauugaucuuggaaucaaguacgacccuagcauagguauuuacggucuugauuucuacguuguguuggggcgccccgguuuuaacguagcccaccgaagagcgaagaagggaaaaguugguuucucucauaggcuaaccaaggaagacgcuaugaagugguuccaacagaaguacgacggaauaaucuuagcgaguaaaaaauag

SEQ ID NO: 448 - RNA, 426 nt, Phyllotreta nemorum
augucuuugguaauuccggagaaauuucaacacauucuucguauccucgguacgaauaucgauggaaaaaggaaagugcaauucgcccucacugccauuaaggguguugguagacguuauuccaauauugucuugaaaaaggcagaugugaacuuggacaaaagggcuggagaauguuccgacgaagaaguugaaaaaaucauuacuauuaugucuaauccucgucaauacaaaauuccugacugguucuugaacagacaaaaggauauuauugaugguaaauacagucagcuaacuucuucaagucuugacucgaaauugcgugaggauuuggaaaggaugaagaagauucgugcccacagagguaugagacacuacuggggucuucgugugagaggucaacacaccaagacuacuggacgucgu

SEQ ID NO: 449 - RNA, 876 nt, Phyllotreta nemorum
augucauccaaugagcaaaaggcucagcaauuaauagcugaagcugagaagaaaguguccucaaggggauuuuucggaucucucuucggaggguccaaucgcauugaagaugcaguggaauguuaccaaagggcugcgaauuuguuuaaaauggcgaaaaacugggaugcugcugguaaggccuuuugugaagcagcaaacuugcauucgagaagcggggcccgucaugauucugcuacuaauuucguagacgcagccaacugcuacaagaaagcugacgucagugaggcuguuaauugcuugcugaaagcuauagaaaucuauacagacaugggaaaauuuacgauggcagccaaguaccaucaaaacauugccgaaauguacgagacugauccaguugaccuagaacgagccguucagcacuacgaacaggccgcggacuacuuccgaggggaagagagcaauucguccgcaaacaaaugucuucugaaaguugcccaguacgcagcgcagcucgaaaacuacgaaaaagcaauacaaaucuaccaagaaguagcuuuuucggcucuagagagcucucuguugaaauacagugcuaaggaguaucuguuuagggcugcccucugccauuuauguguggauauucucaaugcccagcacgcuguagaaaguuauauucaaagguauccugcauuccaagauucccgagaauauaaauuguugaagacguugauggaacacauugaagagcagaauguugauggauacacagaugcugucaaugauuaugauucuauuucucguuuagauccuugguauacuacgaucuugcugcguauuaaaaagcaacuuaaugagagucccgauuugcguuaa

SEQ ID NO: 450 - RNA, 271 nt, Phyllotreta nemorum
cccgauaccgguauuuccaguaaggcgaugaguauuaugaacaguuucgugaaugacaucuucgaaagaauugccgccgaagcuucucgucuggcucauuacaacaaacguucuacuauaacuaguagagaaauccaaacugcugugcgucugcuacuucccggugaacuugccaaacacgccguuagugaaggaacuaaggcuguuaccaaguacaccagcuccaaauaauucgccuacaacaaauacguuggcagcgcauguauuuuua

SEQ ID NO: 451 - RNA, 354 nt, Phyllotreta nemorum
auggcuagucaucaaagccaggguguucagcaacugcuggcagcagaaaagcgagcugcugacaaaguuacagaggccagaaaacgcaaagccaggaggcugaagcaggccaaggaagaggcccaagaugagaucgagaaguaccguaaagaaagggaacgccaauuccgcgaauucgaagccaagcauaugggcucuaaagaggaugucgcuucgaagaucgagcaggacaccaagaggagaaucgaggauaugaacaaggcuauccagagucagaaggaacccgugauugaaaacaucuuggaauugguguacgauaucaagccggaaauccacaagaauuaccgucaguaa

SEQ ID NO: 452 - RNA, 375 nt, Phyllotreta nemorum
augucuggucgcgguaaaggugguaaaguuaagggaaaggcaaagucucguuccaaucgugccggauuacaauuuccuguaggucguauucacagauuguugagaaaaggaaauuaugcugaaagaguuggugccggugcuccgguauacuuggcugcuguuauggaauauuuagccgccgaaguauuggaauuggccgguaaugcagcccgugacaacaagaaaacaagaauaauuccaagacauuugcaauuggcaauuagaaacgacgaggaauuaaauaaguuacuuucugguguuacgaucgcucaaggagguguccuaccgaacauccaagcagugcuucuuccuaagaagaccgagaagaaggcuuaa

SEQ ID NO: 453 - RNA, 5694 nt, Phyllotreta nemorum
auggcugcaacagauagcaaggcuccgcuuagaacuguuaaaagagugcaguuuggaauacuuagucccgaugaaauucgucggaugucaguuacagaagggggcauccgcuuuccagagaccauggaagcgggucgccccaaaauuugcggucucauggauccgagacaggguguuaucgaccgaagcucccgaugccagacuugcgcuggcaacaugaccgaauguccaggccacuucggacacguagacuuagcuaagccaguguuucacaucggauucauaacgaaaaccauaaaaauccucagaugugugugcuucuucugcagcaaguugcuggucagcccuaacaauccuaaaaucaaagaaaucguaaugaagacgaaaggucaaccgagaaaacgacucacguucguguacgauuugugcaaggguaaaaacauuugcgaagguggggacgagauggauguggguaaagaaggcgaugaaaguaagaaggccggacacggaggaugcgguagauaucagccgaacaucaggagaaucggucuggauuuaacggccgaauggaagcaugucaacgaagacacgcaagagaagaaaaucgcucuaucggccgaaagaguuugggaaauacugaaacacaucacugacgaggagugcuucauucucgguauggaucccaaauuugccagaccugacuggaugauuguuacaguauugccuguaccuccuuuauccguacguccugcuguaguuauguacggaucagcuagaaaucaagaugacuugacucacaaauuagcagauaucauuaaaucuaacaaugagcugcagaagaaugaagcugcuggugcugcugcucacauuaucacugaaaauauuaaaauguuacaauuccauguagccacauugguugauaaugacaugcccgguaugccuagggcuaugcaaaaaucaggaaaaccucuaaaagccauuaaagcucgcuugaagggcaaagaaggcaggauuagagguaaucuuauggguaaacgugucgauuucucagcuagaacugucauuacucccgauccgaauuugcgaaucgaucaagucggcauucccagaagcaucgcacagaacaugacuuuuccggaaaucgucacgccuuucaauuucgacaagauguuggaguugguucagaggggaaacucccaauauccaggagccaaauacauuauuagagacaacggagaaagaaucgauuuaagauuucauccgaaaccaucagauuuacauuuacaauggggauauaaaguggaaaggcacaucagagacggcgauuugguaauauucaaccgacagcccacucuccacaaaaugaguaugaugggucacagagucaaaguuuugccuuggucgacguuucgaaugaauuuaucuuguacgucuccuuacaacgccgauuucgauggcgacgaaaugaacuugcacguaccgcaaaguauggaaaccagagcugaaguggagaacauccauaucacacccaggcagauuaucacaccgcaagcgaacaaacccgucauggguaucguacaggacacuuuaacggcuguuagaaagaugaccaaacgagacguguucauagagaaggaacaaaugaugaauuugcuuauguuuuugccuauuugggaugguaaaaugccucguccagcuaucuuaaagccaaaaccacuguggaccggcaaacaauuauuuucucucaucauucccggaaacguaaauaugaucagaacgcacuccacucaccccgacgacgaagacgacggucccuacaaguggauaucuccaggugauacgaaaguaaugguagaacacggugaauuaguaauggggauauuguguaagaaaacccuugguacaucagcagguucgcuacuucauauuuguauuuuggaguugggucacgagguuugcgggagauuuuacgguaacauccaaacagucaucaacaauugguuguuacucgaaggucacaguaucgguaucggugaugccauugccgauccgcagacguacacugaaauucgacgagccauuaaaaaagccaaagaagacguaauagaggucauacagaaggcucacaacauggaacuggaaccuacucccgguaauacguugcgucaaacauucgagaaccaaguaaacagaauauugaacgaugcccgugacaaaacuggagguuccgcgaaaaaaucccuaacugacuacaauaauuuaaaggccauggucgugucggguuccaaagguuccaacaucaauaucucacagguuaucgcuuguguaggccaacagaacguggaagguaaacguaucccguucggcuucagaaaacgcacguugccgcacuucaucaaagacgauuacggucccgagucgagagguuucguagaaaauuccuaccucgccggucugacucccuccgaguucuauuuccacgccaugggagggcgugaaggucucaucgauaccgccguaaaaaccgccgaaaccgguuacauucaacgucguuugaucaaagccauggagagcgucauggugcauuacgacggcaccguaaggaauucgguaggucaacugauccagcugagguacggcgaagacgggcucugcggugaaauggucgaguuucaaacauuguccacggugaagcucagcaacaaagcguucgaaagaaaguuuagguuugaucccaguaaugaacgguaccuucgaagaguuuucaacgaagaagugaucaagcaguuaauggguuccggggagguuauuucggagcucgaaagggaaugggaccaacuucagaaggaccgggaagcucuuagacagaucuuccccagcggugaauccaaaguaguacuacccugcaauuuacaaaggaugauuuggaacguacaaaaaauauuccacaucaacaaaagagcaccuaccgauuuauccccgcuuaggguaauacaaggcguaagggaguugcugaaaaaaugcaucauuguagcaggagaggaucguuugucgaagcaggccaacgaaaacgccacgcuucucuuccagugucuggugcgcuccacuuuguguaccaaaugcguuucggaggaguucaggcuuagcacggaggcguucgaaugguugauaggagaaaucgaaacgcguuuccagcaagcucaagugaacccgggcgaaauggugggcgcucucgcugcccaaucauugggcgaaccugcuacccagaugacauugaacaccuuccacuuugcugguguaucaucgaaaaacguaacucucggugugccgagauugaaggaaauuauaaacauauccaagaaaccgaaggcuccuucuuugacgguauuuuuaaccggugccgccgcgagagacgcugaaaaagccaagaauguuuugugccgacuggaacauacuacuuuacguaaagugacugcgaacacugcuauuuacuacgauccggacccacagaauacagucauaccggaagaucaggaauucgugaacguuuauuacgaaaugcccgauuucgauccuacucgcauuucuccguggcugcugcguaucgaauuggacagaaaaagaaugaccgauaaaaaacucaccauggagcaaaucgcugagaaaaucaacgccgguuucggggacgaucucaauugcauuuucaacgacgacaacgcugagaaauuggugcugcgcauucguauuaugaacagcgacgacgaaaaauucggagauggagccgacgaagacguggacaaaauggacgacgacauguuccucagaugcaucgaggccaacaugcugagcgacaugacgcuucaagguaucgaagccauuucgaaaguguacaugcacuugccacaaaccgacucgaagaaacguauaguaaucaccgauaccggcgaauucaaagccaucgccgaaugguugcucgaaacagacgguaccaguaugaugaaaguacuguccgaaagagacguagacccuguuagaacguuuucgaacgauauuugcgaaauauucucggugcugggaauagaagcuguucgaaaaucagucgaaaaagaaaugaacgccguacuccaauuuuacggucuguacguaaacuacagacaucucgcucugcuuugcgacguuaugacggccaaaggacauuugauggccauaacucgucacgguauaaacagacaagauacgggagcgcugaugagauguucguucgaagaaaccgucgacguguugauggacgcuuccagucacgccgaagucgauccgaugagagggguuucagagaauaucauucucggucaauugccuaggaugggaaccggcuguuucgacuuguuauuggacgcugacaaguguaaaaugggcauaccuauaccucaagcucauaguucggaucuuaugacguccggcauguucuucggcucagcggcaacgcccagcagcaugagccccggcggcgcuaugacuccuugggcucaggcgaauacgccguauguaggcagcgaauggucgccacaaaauaugaugggcagugguaugacuccaggaggagcagcguuuucaccaucagcggcaucggaugcuuccggaaugucgccggcuuacggagcuuggucuccgacgccccaaucuccggccaugucuccuuacauggcuucaccucacggccagucgccuucguacaguccaucgaguccggcauucauacccaccucgccgucuaugacgcccacaucuccaggauauucgccgaguucuccgggcuauucgccuacgaguccuaauuacaguccaacgagucccaguuacucuccgacaucuccaaguuauucgccuacaucgccuaguuacagcccuacgucuccgaguuauucgccuacuucacccagcuacaguccuacgucuccuaguuacucgccgacgucucccagcuacagcccuacgucuccgaguuacucgcccacuucaccgagcuacaguccuacgucuccgaguuauucgccgacgucgccgaguuacagcccuacgucuccgaauuauucgccuacaucuccgaauuacagccccacgucuccuagcuacucgucgacgucucccagcuacucgccgacuucuccgagcuacagccccagcucgcccagcuacucgcccucuucgccuagauacacaccggcuucgcccaauuauucaccgacgucuccgagcuacucgccuucaucgccgcaguauucuucggccucgccgaguuacucgccuucuucgccgaaauauucgccgacgucgccgaguuauuccccgacgucuccgucguuugcgggcggcaguccgcaguauucgccgaccucgccgaguuacucgccgacgucgcccagcuacucgccgucgagcccgcaacacacgccugcgggcagcucgcguuacucgccgagcucgccuaauuauucgccgagcucgccgagcuacucgccgacuucgccgcaguauucgccgcgcagcacgaaauauucgccgacgucgcccacguacacgccgaccaguccgaguuacucgccggcgucgccggcuuacucgccucagccgccuagguauucgccuucgucgcccagcuacucgccgaccagccccgggcaagacaacgacuaa

SEQ ID NO: 454 - RNA, 531 nt, Phyllotreta nemorum
augaaagcuaaaggagaguugaaagaauaugaaguuaucgggcgcaaauugcccaccgacaaagagaaaagccccccauuguauaaaaugaggauauucucucccgacccgagcguggcuaaaucgcgauucugguauguccugagucagcuuaggaaauucaagaagaccaccggagaaaucgugucggucaagccgguacccgaaaaaaccccuaccaaaaucaagaacuuugguauuugguugagguacgcuucccguuccgguacgcauaacauguacagggaguacagagaccucaguguuucuggagccguaacggcuuguuauagagauaugggagcucgucaucgggcuagcgcgcacgcuauucagauuauuaaaguggaacaaguuaagucgagcgacaccaggaggccacaaguccaacaauuccacgauucgaagauucgguucccguugcccaaacguauccaacaccagucuaugaaccgcuucucuguccgcaaacccaggacguacuucuuguaa

SEQ ID NO: 455 - RNA, 408 nt, Phyllotreta nemorum
auggguaaaauaaugaaaucugguaaagucguauugguccucggcggccgauacgccggaaagaaagccgucgucauuaaaacauacgaugauggcacgucugacaaacaauacggacaugcuuuagucgcugguauugacagguaucccaggaaaauccacaagcguauggguaaaggcaaaaugcacaaaagguccaaaaucaagccuuucaucagaauuuuaaacuacaaucacuugaugcccaccagguauucgguagauuuagccuccgauuuaaaagugacuccuaaagaccucaaagauccgaugaagaggaagaaggugcguuuccagacccgcgucaaguucgaagaaagguacaagcagggcaagaacaagugguucuuccagaaauugcgguucuag

SEQ ID NO: 456 - RNA, 405 nt, Phyllotreta nemorum
auggcuauaagaccuguuuaccgaccuaaaaucgucaagaagaggacgaagaaguucauaaggcaucaguccgacagguacucgaagcuaaagcgaaacuggcguaaacccaaggguauugacaacaggguaagaaggagauucaagggccaauauuuaaugccaaauauugguuauggaucagcaucuaaaacuaggcacaugcuaccuacagguuuuagaaaaguguugguacacaacgucaaggaacuagagguucuacucaugcaaaaucguaaauacugugcugaaauagcccaugguguuucaucgaaaaaacgcaaagauaucguugaacgugcucaacaauugagcaucagagucaccaauggacacgcuagauuacguagccaagagaaugaguag

SEQ ID NO: 457 - RNA, 420 nt, Phyllotreta nemorum
auggcgaacaccaacaccgaucuaaucgaagaagacgccgccgacuugcaguuccccaaagaauucgaaaacgccgaaacucugcucauauccgaaguucacaugcugcuagagcacaggaaagagcaaaacgaaucucuggaggacgaacaggaauuuucggauguguucaugaaaacucuaacuuacacggacagauuuagaaaauucaagaacaaagaaaccauaucggccgucaggaauuuauugaugcagacgaaaaaacuccacaaauucgagcuggccgccauagcgaacuuguguccggagaccaccgaggaggcgaagucucugauacccucgcuggagggccguuuggaggacgaggagcuccagucgauuuuggacgacauucaaaccaaaaggagcauacaauauuaa

SEQ ID NO: 458 - RNA, 1209 nt, Phyllotreta nemorum
auggcgguguaucagacauacauaaacgcgaugaacgacaaaaucaagcgacaaauagccauuaauaauccguuuguauucaaacauauaucuaacuuaaaggguaucgaucauuuugaugauauuggaccaugcguggugauggcauccccugguaugaugcaaagcgguuuguccagagaacuguucgaaaccuggugcacagacgcaaagaauggagucauuauagcggguuacuguguugaaggaacguuagcuaaaacgauauugucagaaccagaggaaauuacgaccaugguugggcaaaaguugccguuaaaaauguccguugauuacauaucuuuuucugcucacaccgauuaccagcagaccagcgaauucauacggauucugaaaccuccucaccuuguguugguucacggggaacaaaacgaaaugaaccguuugaaagcggcccuucaaagggaauacgaagacgauagcaacacaaccauuaacauauacaacccgaggaacacgcauuccgucgaguuguacuucagaggcgagaaaacggccaagguaaugggacagcuagcagucgaugaaccgaaaacagggaaaacuuugaacggcauauugguuaaaaggaauuucaauuaucacguuuuaucuccugacgauuuacccaaauauaccgauuugaauauaagucaaauacugcaaagacagagucugcacuauuccggcaacagcggaguuuugagauacaugauaucccaaguagccggccuguuggaauccauagacggggagaagaaaaugcgagccuucaaugcaguagauauuauaaucgaaaauaaaauugucauuuuagaguggguggcgaaucccguaaacgauauguacgcagaugcgauaguagcggcgauuuuacaagcugauuuauuggaagcgcccauuaaaaacgugacgaccuccguuaaaauggacaggaugcacuucaaggagugccucaucgagauguugcaggacauguucggggaagauucggugccgaagauauucaagggggaaaaguuguaugucgccgugaacgacaaacgagcugauauugaucucaauaauuuggauguuaaaugucccgaagacgaaacuuuccaacagauuguucagacugcugugacgaaauuguaccagucauuggcucccccacaauuugaaucuuag

SEQ ID NO: 459 - RNA, 3534 nt, Phyllotreta nemorum
augaaagagcaaaugcucaaaggcgaggaacuggagcuucgcaaaaagaucauagaaaaauccaaggacggcucgcugaagaccaccaacggcgaggccaccaaaucggcggcggcgccgaagaaacggggccgaugggaccaaacggucgacgacgccgucguaccgcaaaaaaagaaaacccucggcguuucgacgagcagcagcgccgcgacgcccgucugggaaggagacaaaacaccggccgacauacgaugggacgagacgccgggucacaagggcagcgaaacgccgggagcgacgcccggccaaucuacgagaaugugggacgccacgccgggaccggcgacgcccggccgagagacgcccggucauucgggcgauaaaagcacgucgagacgcaaccguugggacgagacgccgaaaaccgaacgcgaaacgcccggccauucgagcgguugggccgaaacgccucgaaccgaucgaaucggggccgauuugauacaggagacuccgacuccgggcgcuucgaaacgucgaucuagaugggacgaaacgccuucggccacucccucgcaggccaugacgcccggcgcuaugacaccgaguacuccucacgguaccccgcacgcuacgccuacucacggucacgcuacuccacucuuaacaccggguggcucgacucccguaggggcgaaggccaugucgauggcgacucccacgccgggucacuuggcuucgaugacgcccgaacaacuacaagcuuacagaugggagcgagaaaucgacgaacguaaccgacccuauucggacgaugaacuggacgcgauguucccgccuggcuauaagguccuuccuccuccggcuggcuacgugccuaucaggacgccggccaggaagcugacggccacgccgacgccguuggugggcggcacgccuaccggguuuuucauacagcaggaggauaaaagcgcgaaguacauggacaaccagccgaaagggcagaauuugccuuucaugaagcccgaagacgcccaguauuucgauaagcuacugguggacguggacgaagacgcgcuggcucccgaagaacagaaagaacguaaaaucaugaaguuguuguugaaaauuaaaaacggcacgcccccgaugcgcaaagccgcccuacgacaaaucaccgauaaagcuagagaguuuggggccgguccguuguucaaucaaauccugccgcuuuugaugagccccacguuggaggaucaagagaggcauuuguuggugaaagucaucgauaggauuuuguacaagcuagacgauuuggucagaccguacgugcacaaaauucucgucguaaucgaaccguuguugaucgaugaggauuauuacgcgcgcguagaaggccgugaaaucauuucgaauuuagccaaggcagcuggauuagcaacuaugauuuccacgaugcguccggauaucgauaacauugaugaauacgugcguaauacgacagcuagagcuuucgcuguggucgcuucggcuuuggggauucccucguuguugccuuuucucaaagccguauguagaucgaagaaaucguggcaggccaggcacaccggcaucaaaaucguacaacaaaucgcuauacuaauggguugcgcgauuuugccucacuugaaaagcuugguggagauaauagaacacgggcuggucgaugagcaacaaaagguucguaccauuacggcucuggggauagccgcuuuggccgaagccgcuaccccguacggcauagaaagcuucgauuccguguugaaaccgcuuuggaaagguauaaggacucacagaggcaaaggacuggccgcuuuccucaaagcuaucgguuacuugauaccgcuuauggacucggaauacgccaauuauuacacgagagaagucauguugauuuugaucagggaauuucaaucgccagacgaggaaaugaagaagaucguuuugaaaguggugaaacaaugcuguucgacggacggugucgaaucgcaauacauaaaagaggaaauucuaccgcaguuuuucaagcauuuuuggaaccacaggauggccuuggacaggaggaacuacaggcaauuggucgauacgaccguugagauagcuaacaaagugggcgcuucggagauuaucaacagaauaguggacgauuugaaagacgaaaacgaagcuuacagaaagauggugauggaaaguaucgagaagaucauggguaaucucggagcggccgauguggauuccagauuggaagagcaauugaucgauggcauuuuguacgcuuuucaagaacaaacuaccgaagacguggucauguugaaugguuucgguacgaucguuaaccaacuggguaaacgugucaaaccuuacuuaccacaaauaugcgguaccauccuguggcguuuaaacaacaagucggcuaaagugcgccaacaggcggcugauuugauaucccgcauagccguagugaugaaaaccugucaggaagagaaacugaugggccacuugggcgucgugcuguacgaguaccucggagaagaguacccggaaguguuggguuccauauugggcgcucuaaaagccauaguaaacguuauaggaaugacuaaaaugacgccucccaucaaagaucuccugccuaggcucacgccuauccucaaaaaucgucacgaaaagguccaagaaaauugcaucgaucuagucggcaggauagccgaucgagggcccgaauacguaucggcgcgcgaauggaugagaaucuguuucgagcuauuggaacuccucaaagcccacaaaaaagccaucagaagagcuacggugaacacguucgguuacauagccaaagccaucgggccgcacgacguuuuggccacguugcugaauaaccucaaaguacaagaacgucagaauagggugugcacgacggucgccauagcgaucguggccgaaacuugcucgccuuucaccguccuaccggcuuugaugaacgaauacagggugcccgaauugaacguucaaaacgggguguugaagucccugucuuuucuguucgaauacaucggcgaaaugggcaaggacuacauuuaugcugucgcgccuuugcucgaagacgcucugauggacagagauuugguacacaggcaaaccgcuugcgcagcaaucaagcacaugucacugggaguguacggguucgguugcgaggacgcuuugguacaccuguugaacuacguguggccgaacauauucgagacaucgccucacuuggugcaggccuucauggacgccaucgagggcaugcggguggcccucggacccgucaaaauccugcaguacacucugcaggggcuguuccauccggcuaggaaggugcgggacguuuacuggaagauuuacaauucuuuguacaucggagggcaggacgcucuggucgcuggcuauccuaggaucaugaacgaucccaaaaaucaguauguucgguacgaauuggauuauauauuguaa

SEQ ID NO: 460 - RNA, 804 nt, Phyllotreta striolata
auguccaaaguaaaugaaguugcugauuuguacaaacaauugaaauccgaauggaauacaaaaaacccaaacuuaaguaaaugcgagaaacuccugucucaacugaagcucgaauugacuaauuugauguuucugccaacuucaacggccacagcuacaaagcaggaauuacuucuagcccgugaugucuuagaaaucgguguacaauggaguguagcagccaacgauauaaccgcguucgaaagauacauggcucaauugaaaugcuacuauuucgauuacaacaaccagcuuccugaaucugcauuuaaguaucaauuacugggauugaaucuucuguuuuuauugucgcuuaacagaguggcggaauuucauacggaguuagaacuucugccggcugaucauauacagaacgauguguacauaaggcaucccuuaucgauugagcaauacuuaauggaaggaaguuacaauaagaucuuccuugcaaaagguaacguucccgcagcgagcuacaccuuuuuuauggacauacugcuugauacgaucagaguugaaauugcggauuguuuaucaguagcguaugaaaagauaucuguaaaggauuuuacuagaaugcucuacuugccgaaugaagaagcugcuaaaaauuuugccaaaaaggcuuuucaaaacaaggcuuggaaauuagaccaugacuacuucuauuucauucccgaacagaaggcacacgaaccuauuccuucgaaggaauuggcccagcaagcaauugaauacgcuaaggaacuugaaaugaucguuuaa

SEQ ID NO: 461 - RNA, 456 nt, Phyllotreta striolata
augggucggaugcacgcgcccgguaaagguaucgcccaaucggcguugcccuacagaagaagcgucccuacguggcucaagguaacccccgaagaagugaaagagcacaucuucaaauugggcaagaagggucucacgccgucccaaaucggugucauccugagggacuccuacgguguagcccaagucagguucguguccggcaacaagauccugcgcaucaugaaggccaugggacuggcgcccgaucuacccgaggacuuguacuaccucauuaagaaagcaguggccauccgcaagcacuuggagaggaacagaaaggacaaggacagcaaguuccguuugauuuugguagagucucguauccaccggcucgccagguacuacaagaccaaaucagucuuagccccuaacuggaaauacgaaucgagcacggcuucggcuuuggucgcuuaa

SEQ ID NO: 462 - RNA, 807 nt, Phyllotreta striolata
auggccgucgguaaaaauaaggguuugucgaaaggaggcaaaaaaggaguuaaaaagaaggucauagauccuuucacgaggaaagauugguacgaugucaaggcaccgucgauguucaccacgcgccaagucggcaaaaccuuggucaaccguacccaagguacuagaaucgcaucugagggcuugaaauucagagucuucgaaguuucauuagccgacuuacagaacgacaaugaugccgaaaggucuuucaggaaguuccguuugauugcugaagauguucaagguagaaacguauuaaccaauuuccacgguauggauuugaccaccgacaagcugagaucgauggugaagaaauggcagacucucaucgaagcuucugcugacgugaagacuuccgauggguucuugcuuaggguauucuguauugguuucaccaacaaagaucagcauucccaaaggaaaacgugcuaugcccagcauacacaaguuagagcuauucgcaagaagaugguggaaaucaucacccgugacauccaggguuccgacaucaaggaaguagucaacaaacuguugcccgacagcauagcuaaggauaucgagaaggccugccaagguauuuacccgcuucacgaugucuacauucguaaggugaaggugcugaagaagccgcguuucgaccuuuccaaguuguuggaauugcacggugacggcggcaaaggaggcgccggugacaccaccggugaaggcgguucuaaaguagauaggccagagggauacgaaccacccguacaagaaucgguauaa

SEQ ID NO: 463 - RNA, 831 nt, Phyllotreta striolata
augagcuacguuuuguguccggaaauaccagagccgggauuuucauucgaaaacugcaaaagaaaugccuuacuggaaagcaagggauuuaccaccccuaaagcaaucaagacagguacuacaaucguagggauaguuuacaaagauggcgugauucuuggggcugauacuagagcuacagaagauacuacgguagccgauaaaaacugcgaaaaaauccacuuucuggcaccaaauauguauuguuguggugcaggaacugccgcagacaccgaaaugaccacucaaaugguagcagcccaacuggaauugcauaagcucuacacgaaccgagaagcucguguagcgacagccaaccagcuccugaagcaauauuuauucagcuaccaaggcuacauuggagcugcgcugauucuuggaggcguugacaucgaagggccccauuugcacaugauuuauccucacgguuccagcguggauuugccuuaugcuaccaugggauccgguucuuuagccgccauaucaguguuugaguuagguuggaaaccagagaugggagaagaagagggcauccagcugguuagaaacgcuauagcugcugguauauucaacgauuuaggaucugguuccaacguagauguguguaucauacguaaaggagugguggauuacagaaggaccuacgaugaagccaauaaaaagggcgugagacaaggaucuuacaaauuccccaggggcgcuacggcuguuuugucuacuaaaguugucgauguagaagaaguuucuguuacacccguagaagcugaaagaauggacguugccgcuuuuuaa

SEQ ID NO: 464 - RNA, 576 nt, Phyllotreta striolata
auggcgcccguagcgaagccuaaggaauccaaagacaaaagagaugucaaggauaaaaccaaaaaucauaugcgggaauugcauauccgcaaauuaugccuuaacauuuguguaggagaaucuggugacagacuuacucgugcugcuaagguauuagaacaacugacuggccaacaaccagucuucucaaaagcccgauacaccgucaggucuuuuggaauucguagaaacgaaaagauugcuguacacugcacaguaagaggcgcgaaggccgaggaaauauuagaaaggggcuuaaaagucagagaauacgaauugaggagggauaacuucucuaucucugguaacuucgguuucgguauccaagaacacauugaucuuggaaucaaguacgacccgagcauagguaucuacggucuugauuucuacguuguguugggucgccccgguuucaacguagcccaccgaagagcgaagaaaggcaaaguugguuucucucauagguuaaccaaagaagacgcuaugaagugguuccaacagaaauacgacggaauaauuuuagggaguaaaaaauag

SEQ ID NO: 465 - RNA, 459 nt, Phyllotreta striolata
augucuuugguaauuccggagaaauuucaacacauucuucguauccucgguacgaauaucgauggaaaaaggaaagugcaauucgcccucacugccaucaagggaguugguagacguuauuccaauauugucuugaaaaaggcagaugugaaccuagacaagagggcuggagaauguuccgacgaagaaguugagaaaauuauuacuauuaugucuaauccucgucaauacaaaaucccugacugguucuugaacagacagaaggacauuauugaugguaaauacagucagcugacuucuucaagucucgacucgaaguugcgugaggauuuggaaaggaugaagaagauucgugcccacagagguaugagacacuacuggggucuccgugugagaggucaacacacuaagacuacuggacgucguggacguacuguugguguguccaagaagaaguaa

SEQ ID NO: 466 - RNA, 876 nt, Phyllotreta striolata
augucauccaaugcacagaaggcucagcaauuaauagcugaagcugagaagaaaguguccucgagggguuucuucggaucucucuucggaggguccagccgcaucgaagaugcaguggaauguuaccaaagggcugcaaaucuguuuaaaauggcgaaaaauugggaugcugcuggaaaggccuuuugcgaagcagcaaacuugcauucgagaaguggggcucgucaugacgcugcuacuaauuucguagacgcagccaacugcuauaagaaagcugacauuagugaggcuguuaauugcuugcugaaagcuauagaaaucuauacagacauggguaaauuuacgauggcggccaaguaccaucaaaacauugccgaaauguacgagacugaucccguugaccuagaacgagccguucagcacuacgaacaggcagcggacuacuuccgaggcgaagagagcaauucauccgcaaacaaaugucuucuaaaaguggcccaguacgcagcacagcucgaaaacuacgaaaaagcaauacaaaucuaccaagaaguagcuuuuucggcuuuagagaguucccuguuaaaauacagugcuaaggaguaccuguuuagggccgcucucugccauuuauguguggauauucucaaugcccagcaugcuguagaaaguuauauucaaagguauccugcauuucaagauucccgggaauauaaauuguugaaaacguugauggaacacauugaagagcagaauguugauggauauacagaugcugucaaugauuacgauucuauuucucguuuagauccuugguauacuacgaucuugcugcguauuaaaaagcaacucaaugagagccccgauuuacguuaa

SEQ ID NO: 467 - RNA, 372 nt, Phyllotreta striolata
augccacccaaaacuaguggaaaggcggcuaaaaaagcuggaaaagcucaaaagaacauuuccaaagccgauaaaaagaagaaaaggaggaggaaggaaaguuacgcaaucuacauuuacaaaguuuuaaagcaaguacaucccgauaccgguauuuccaguaaggcgaugagcaucaugaacaguuucgugaaugacaucuucgaaaggauugcugcugaagcuucucgucuggcucauuauaacaaacguucuacuauuacuaguagagaaauccaaacugcugugcgucuacuccuucccggugaacuugccaaacacgcuguuagugaaggaacuaaggcuguuaccaaguacaccaguucgaaauaa

SEQ ID NO: 468 - RNA, 354 nt, Phyllotreta striolata
auggcaagucaucaaagccaugguguucaacaacuacuggcagccgaaaagcgagcugcugauaaagucacagaggccagaaaacgcaaagcgaggagacuaaagcaggccaaggaagaggcccaagaugagaucgagaaguaccguaaagaaagggaacgccaauuccgcgaauucgaggccaagcauaugggcuccaaagaggauguagccucgaagaucgaacaggacaccaagaggagaaucgaggauaugaacaaggcuauccaaagucagaaggaacccgugauccaaagcaucuugggauugguguacgacaucaagccggaaauccacaagaauuuccgccaguaa

SEQ ID NO: 469 - RNA, 375 nt, Phyllotreta striolata
augucuggucgcgguaaaggugguaaaguuaagggaaaggcaaagucacguuccaaucgugccggauuacaauuucccguuggucguauucacagauuauugaggaaaggaaauuacgccgaaagaguuggugccggugcuccgguauacuuagccgccguuauggaauauuuggcugcugaaguauuggaauuggccgguaaugcagcccgugauaacaagaaaacgagaauuauuccgagacauuuacaauuggcaauuagaaacgacgaggaauugaauaaauuacuuucuggaguuacgaucgcucagggugguguccuaccgaacauccaagcagugcuucuuccuaagaagaccgaaaagaaggcuuaa

SEQ ID NO: 470 - RNA, 5280 nt, Phyllotreta striolata
auggcugcaacagauagcaaggcuccacuuagaacuguuaaaagagugcaguuuggaauacuuaguccagaugaaauccgucggaugucgguuacagaagggggcauccgcuuuccagagaccauggaagcgggucgccccaaaauaugcggucucauggaucccagacagggcgucaucgacagaagcucccgaugccagaccugcgcuggcaacaugacugaauguccaggccacuucggacacguugauuuagccaaaccaguauuucacauuggauucauaacgaaaaccauaaaaauccucagaugugugugcuuuuucugcagcaaauuguuggucagccccaacaauccgaaaaucaaagaaaucguaaugaagacgaaaggccaaccgaggaaacgacucacguuuguuuacgaucugugcaaagguaaaaacaucugcgaagguggagacgaaauggacguggguaaggaaggcgaugaagguaagaaggcuggacacggagguugcgguagauaccagccgaacauccggagaaucgguuuggauuuaacggccgaauggaagcacgucaacgaggacacgcaggagaaaaaaaucgcucuaucggccgaaagaguuugggaaauacugaaacacaucaccgacgaggaaugcuucauccucggcauggaucccaaauucgccagacccgauuggaugauuguuacuguguugccuguaccuccauuauccguacguccugccguuguuauguacggaucggccaggaaucaagaugacuugacucacaaauuggcggauaucauuaaaucgaacaaugagcugcagaagaaugaagcugcuggugcugcugcucacauuauuacugagaacauuaaaauguugcaauuccacguagccacguugguugacaaugacaugcccgguaugccuagggcuaugcaaaaaucuggaaaaccucuaaaagccauuaaagcucgucugaagggcaaagaagguaggauuagagguaaucuuauggguaaacgugucgauuucucagcuagaaccgucauuacuccugauccgaauuugcgaaucgaucaagucggcauuccgagaagcaucgcucagaacaugacuuuuccagaaaucgucacgccuuucaauuuugacaagauguuagaguugguucaaaggggcaauucccaauauccaggagcgaaauauauuauuagagauaacggggaaaggauagauuugagauuucauccgaaaccuucggauuuacaucugcaauggggauauaaagucgaaaggcacaucagagacggcgauuugguaauauucaaucgacaaccgacucuccacaagaugaguaugaugggucacagagucaaaguauugccuugguccacguuucguaugaauuuaucguguacguccccuuacaacgcggauuucgauggcgacgaaaugaauuugcacguaccgcaaaguauggaaaccagagcggagguggaaaauauccacaucacgcccagacagauuaucacgccgcaagccaacaaacccgucaugggaauuguacaggacacauuaacggcugucaggaaaaugaccaaacgagacguguucauugaaaaggaacaaaugaugaauuugcuaauguuuuuaccuauuugggaugguaaaaugccccguccggcgauauuaaagcccaaaccucuguggacugguaaacaauuauuuucucuuauuaucccuggaaacguaaauaugaucagaacgcacucuacucacccugaugacgaagacgacgguccuuauaaauggauaucuccaggugauacaaaaguaaugguagaacacggugaauuaguaaugggaauauugugcaagaaaacucuugguacaucagcagguucacuacuucauauuuguauucuggaauugggccacgagguuugcggaagauuuuauggcaacauccaaacggucaucaacaauugguuacuacuugaaggucacaguaucgguaucggugaugcgaucgccgauccgcagacguacacagaaauccgaagagccauuaagaaagccaaagaagauguaauagaggucauacagaaagcucacaacauggaacuggaacccacgcccgguaauacguugcgucaaacguucgagaaucaagugaacaggauauugaacgaugcccgugacaaaaccggagguuccgcgaaaaaaucucuaaccgacuacaacaauuuaaaggccauggucgugucggguucuaaagguucuaacaucaauauuucacagguuaucgcuuguguaggucaacagaacgucgaagguaaacguauaccguucggcuucagaaaacgcacguugccgcacuucaucaaagacgauuacggucccgagucgaggggcuucguggagaauuccuaccucgccggucugacucccuccgaguucuauuuccacgccaugggagggcgugaaggucucaucgauacggccguaaaaaccgccgaaaccggguacauccaacgucguuugaucaaggccauggagagcguuauggugcacuaugauggcaccguaagaaauucgguaggucaauugauccagcugagguacggcgaagacggccuuugcggggaaauggucgaguuccaaacgcuguccaccgugaagcucagcaacaaggcguucgaaagaaaguucagauucgaucccagcaacgaacgauaccuucgaaggguguuuaacgaagagguaaucaagcaauugauggguuccggugaggugauuuccgagcucgaaagagaaugggaccaacuucaaaaggaccgagaagcccuucggcaaaucuuccccagcggcgaauccaaagugguauuaccuugcaauuuacaaagaaugauuuggaacguacaaaaaauauuccauaucaacaaaagggcgccuacugacuuaucgccgcuuagaguaauacaaggcguaagggaauuguugaaaaaguguauaauuguagcgggagaggaucguuugucgaagcaggccaacgaaaacgccacgcuuuuauuccaaugucuagugcgcuccacuuuaugcaccaaaugcguuucugaggaguuccgacucagcacggaggcguucgagugguugauuggagagauagagacccgcuuccagcaggcucaggugaaccccggcgaaauggugggcgcucuagccgcccaaucuuugggcgaacccgccacccaaaugacauugaacacuuuccauuuugccgguguaucaucgaagaacguaacucucggugugccgagacugaaggaaauuauuaacaucucgaagaaaccgaaggcgccuucuuugacgguguuuuugacgggcgccgcugcgagggaugccgaaaaagccaagaacguuuuaugucgacucgaacacacuacuuuacguaaagucaccgcgaacacugccauuuacuacgaucccgauccgcaaaauacagucauaccugaggaucaggaauucguuaacguuuauuacgagaugcccgauuucgaucccacucguauauccccuuggcugcugcguaucgaauuggacaggaagagaaugaccgauaagaaacuuaccauggaacaaaucgccgaaaaaaucaacgccgguuucggugacgaucucaauugcauuuucaacgacgacaacgcggaaaaauuggugcugcgcauccgaaucaugaacagcgacgacgagaaauucggagacggagccgacgaggacguggacaaaauggacgacgacauguuccucaggugcaucgaggccaauaugcugagcgacaugacgcuccaaggcaucgaggccauuucgaaaguuuacaugcauuugccacagaccgauucgaagaaacgcauuguaauuaccgauaccggcgaauucaaggccaucgccgaaugguugcucgaaacggacgguacgaguaugaugaaagugcugucggaaagagacguggacccugucaggacguuuucgaacgauaucugcgaaauauuuucgguguugggaauagaagccguucgaaaaucaguggaaaaagaaaugaacgccguacugcaauucuacggucuguacgugaacuacagacaccucgcgcugcuuugcgacgugaugacggccaaaggacauuugauggccauaacucgucacgguauaaacagacaggauacgggcgcgcugaugagaugcucguucgaagaaaccgucgacguacugauggacgccuccagucacgccgaagucgauccgaugagaggcguaucggagaacaucauucucggccaauugccgaggaugggaaccggcuguuucgauuuguuguuggacgccgauaaauguaaaaugggcauaccgauaccucaagcucacaguuccgaucucaugacguccggcauguucuucggcucggcggcgacgccgagcagcaugagccccggcggugccaugacuccuugggcucaggcgaauacuccuuauguaggcagcgaguggucaccacaaaauaugauggguagcgguaugacuccgggaggagcggcguuuucucccucugcagcaucggacgcuucuggaaugucgccagcuuacggagcuuggucuccgacgccucaaucuccggccaugucaccuuauauggcgucaccucacggccaaucgccuucuuacaguccuucgaguccagcauucauacccaccucgccgucuaugacgcccacaucucccggauauucuccaaguucuccagguuacucgccuaccaguccuaauuacaguccuacgaguccgaguuauucaccaacaucuccaaguuauucaccgacgucgccuaguuacaguccgacgucuccuagcuauucgccgacgucgccaagcuacaguccuacgucuccuaguuauucgccgacuucuccgagcuacagcccuacgucgccgaguuauucgccgacaucuccgagcuacaguccgacgucuccgaguuacucgccgacguccccgagcuacaguccuacaucgccgaauuacucgccuacgucuccgaauuacagcccgacgucgccgagcuauucgucgaccucgcccaguuacucgccuacgucuccgaguuacagcccgagcucgcccaguuacucgccgucgucgccgagguacacccccgccucaccuaacuacucgccgacgucgcccaguuacucgccgucgucgccgagguac

SEQ ID NO: 471 - RNA, 531 nt, Phyllotreta striolata
augaaagcuaaaggagaguugaaagaauaugaaguuaucgggcgcaaauugcccaccgauaaagagaaaagccccccauuguauaaaaugaggauauucucucccgacccgaucguggcuaaaucgcguuucugguauuuucugaggcaacuuaggaaauucaagaagaccaccggagaaaucguuucggucaagccgguacccgaaaaaaccccuaccaagauuaagaacuuugguauuugguugagguacgauucccguuccgguacacauaacauguacagggaauacagggaccucagcgugucuggagcuguaacggcuugcuauagggauaugggggcucgucaucgggcuagagcacaugcuauucagauuauuaaaguggaacaagucaagucgagcgacaccaggaggccacaagucaaacaauuccacgauucgaagauucgguucccguugcccaaacguauccaacacaagucuaugaaccgcuucucuguccgcaaacccagaacauacuuccuguaa

SEQ ID NO: 472 - RNA, 408 nt, Phyllotreta striolata
auggguaaaauaaugaaauccgguaaagucguauugguccucggcggccgauacgccggaaagaaagcggucguuaucaaaaccugcgaugauggcacgucugacaaacaauacggacacgcuuuagucgcugguauugacagguaucccaggaaaauccacaagcguauggguaaaggcaaaaugcacaaaagguccaagauuaagccuuucaucaaaauuuuaaacuacaaucacuugaugccuaccagguacucaguagauuuagccucugacuuaaaaguaacagcuaaggaccugaaagauccgaugaagaggaagaaggcucguuuccagacccgugugaaauucgaagaaagguacaagcagggcaagaacaagugguucuuccagaaauugcgguucuag

SEQ ID NO: 473 - RNA, 405 nt, Phyllotreta striolata
auggcuauacgaccaguuuaccgaccuaaaauugucaagaagaggacgaagaaguucauuaggcaucaguccgacagguacucgaagcuaaagcgcaacuggcguaaacccaaggguauugacaacaggguaaggaggagauucaagggccaauauuugaugccaaauauugguuauggaucagcaucuaaaacuaggcacaugcuaccuacagguuuuagaaaaguguugguacacaacguuaaggaacuagagguucuacucaugcaaaaucgcaaauacugcgcugaaauagcccacgguguuucaucgaaaaaacgcaaagauaucguugaacgugcucaacaauugagcaucagagucaccaauggacacgcuagauuacguagccaagagaaugaguag

SEQ ID NO: 474 - RNA, 420 nt, Phyllotreta striolata
auggcgaacacgaacaccgaucuaaucgaagaagacgccgccgacuugcaguuccccaaagaauucgaaaaugcggaaacucuacuuauaucggaggugcacauguuguuggagcacaggaaagagcaaaacgaaucucuggaggacgagcaggaauuuucggauguguucaugaaaacucuaaccuacacggauagauuuaggaaauucaagaacaaagaaaccauaucggcugugagaaauuuauugaugcagacgaaaaaauugcacaaguucgaauuggccgccauagcgaauuugugcccggaaaccaccgaggaggcgaagucucugauaccgucgcuggagggccgucuggaggacgaggaacuccaaucgauuuuggacgauauucaaacgaaacggagcauacaauauuaa

SEQ ID NO: 475 - RNA, 2064 nt, Phyllotreta striolata
augucuuauaaaagaaaagcggagucacaaauccccgcugaagagagcgaucaacugauuauacgaccacuaggagccggccaagaaguaggaagaucauguauuaugauugaauuuaaaggaaaaaaaaucauguuggauugcggaauacauccagggcuaucugguauggaugcuuuaccauucguggacuuaauugaagccgaugaaauugauauacuccuaauaucucauuuccaucucgaucacagcggagccuugccuugguuucuauuaaaaacuagcuuuaagggccgauguuuuaugacccaugcaaccaaagcuauuuacagguggcuguugucugauuacauuaaaguuaguaauauugcuacggaacaaauguuauauacagaggcugauuuggaagccaguauggacaaaaucgaaacgauaaauuuccacgaagaaaaagauguauuggguguuaaauuuugggcuuacaaugccggacacguacugggagcugccauguuuaugaucgaaauagccggugucaaaauacucuauacuggagauuuuucucgacaagaggauaggcauuuaauggccgcagaaauucccacgauacauccagaugucuuaauaacggaaucuacuuaugguacacacauucaugagaaaagggaggaucgugagagucgguuuacuacauuagugcacgauaucguaaauagagguggaaggugucugauaccgguauuugcuuuaggaagagcccaagaauugcugcuuauuuuagacgaauauuggagucaacauccggaacuccacgacaucccgaucuauuacgcuuccuccuuagcgaagaaaugcauggcugucuaucagacuuacauaaacgcgaugaacgacaaaaucaagcgacaaauagcgauuaauaauccguuuguauucaaacauauaucuaacuuaaaggguaucgaucauuuugaugauaucggcccgugcguagugauggcaucccccgguaugaugcaaagcgguuuguccagggaacucuucgaaacuugguguaccgaugcgaaaaauggaguuaucauagcagguuacuguguagaaggaacgcuagcuaaaacgauuuuaucagaaccagaagaaauuacgacuaugguugggcaaaaguugccguuaaaaauguccguugauuacauaucuuuuucugcucacaccgauuaccagcaaacuagcgaauucauacgaauauugaaaccuccucauuuaguguuaguucauggggaacaaaacgaaaugagucguuugaaagcggcccuucaaagggaauacgaagacgacagcaacacuaccauuaacauauacaacccgagaaacacgcauuccgucgaauuguacuucagaggcgagaaaacggcgaaaguaaugggacaauuagccguagaugaaccgcaaaccggcaaaacuuugaacgguauauuggucaagaggaauuucaauuaucacguucuaucgcccgacgauuuaccgaaauauaccgauuugaauauaagccaaauauugcaaaggcagaguuugcauuauuccggcaacagcggaguuuugagauacaugauaucgcaaguggccgguuuauuggaaucgaucgacggggagaagaaaaugcgcgccuucaaugcaguagauauaauaauugaaaauaaaaucgucguuuuagaguggguggcgaauccagucaacgauauguacgcagaugcgauaguagcggcgauuuugcaagcggauuuguuggaacaacccauuaaaaacgugacgaccuccguuaaaauggacaggaugcauuucaaggagugccugaucgagaugcugcaggacauguuuggagaggauucggugccgaagauauucaagggggaaaaguuguacguugccgugaacgauaaacgggcggauaucgaucuuaauaauuuggaugugaaaugucccgaagacgaaacguuccaacaaauuguucaaacugcugugacgaaauuguaccagucguuggcuccuccacaauuugagucauag

SEQ ID NO: 476 - RNA, 3531 nt, Phyllotreta striolata
augaaagagcaaaugcugaaaggcgaggaauuagagcuccguaaaaaaaucaucgaaaaauccaaggacggcucgcugaaagcguccaacggcgacgccaccaaaucagcggcaccgaagaaacggggccgaugggaucagaccgucgacgacgccguggcgccgcaaaaaaagaaaacccucagcguaucgacgagcagcagcgccgcgacgcccguuugggaaggagacaaaaccccggccgauauacguugggacgagacgcccggucacaaaggcagcgaaaccccgggggcgacgcccggccaaucgacgcgaaugugggacgcgacgccgggcccggcgacgcccggccgagaaacgcccggccauucgggcgacaagagcacgucgcgacgcaaccguugggacgagacgcccaaaacggaacgcgagacgcccggccauucgagcgguugggcggagacgccgagaaccgauagaaucggcgccgauuugauacaggagacgccgacgccgggcgcuucgaaacgccgaucgcgcugggacgagacgccgucggcgacgcccucgcaggcgaugacgcccggcgccaugacgcccaguaccccgcacgguaccccgcacgcuacgccuacucacggucacgccacgccgcuucucacgcccggcgguucgacgcccgucggcgccaaggcgaugucgauggcgacgccgacgccgggccacuuggcgucgaugacgcccgaacaacugcaggccuaccgaugggagcgcgagaucgacgaacgcaaccggcccuauucggacgacgaguuggacgccauguucccgcccgguuacaagauccugccgccgcccgccggcuacgugcccauccggacgccggccaggaagcugacggcgacgccgacgccgcuggcgggcggcacgccgaccggcuucuucauccagcaggaggacaagagcgccaaguacauggacaaccagcccaaagggcagaaucugccguucaugaagcccgaggacgcgcaguacuucgacaagcuguuggucgacgucgacgaggacgcgcucgcgcccgaagagcaaaaagaacggaagaucaugaaguuguuguugaagaucaagaacggcacgccgccgaugcgcaaagcggcccugcggcagaucaccgacaaagcgagagaauucggugcgggaccguuguucaaucaaauacugccgcuguugaugagcccgacgcucgaagaucaagagagacaucuguuggucaaagucaucgauaggauuuuguacaagcuggacgauuuggugaggccguacgugcacaaaauccucgucgucaucgaaccguugcugaucgacgaggauuauuacgcgcgcgucgaaggucgcgagaucaucucgaaucuagccaaagcggccggauuggcgacgaugaucuccacgaugcgucccgauaucgauaacaucgacgaguacgugcguaacaccacggcuagggcuuucgccgugguggcuucggcguugggaauccccucguuguugccguuccuuaaagccguguguagaucgaagaaaucguggcaagccaggcauacggguauuaagaucguucaacaaaucgccauacucauggguugcgcgauucugccgcaucugaaaagcuugguggaaaucaucgagcacggucuagucgaugaacaacaaaaaguccguacgauuacggcuuuggggauagcugcuuuagcggaagccgcuacgccguacgguaucgaaagcuucgauuccguguugaaaccgcucuggaaagguauaaggacucacagaggcaaaggccuggcagcuuuucucaaagccaucgguuaccugaucccucuuauggacuccgaauacgccaacuacuacacgagagaagugauguugauauugaucagggaauuccaaucgcccgacgaagagaugaagaagaucgugcugaagguggugaagcaauguuguucgaccgacggcgucgaaucgcaauacaucaaagaggagauccugccgcaguucuucaagcauuucuggaaccaccggauggccuuggacaggaggaacuacaggcaauugguggauacgacgguggagaucgccaacaaagugggcgcuucggagaucaucaauagaauaguggacgauuugaaggacgaaaacgaggcguacagaaagauggugauggagagcaucgaaaagaucauggggaaucucggcgcggccgauguggauucgagauuggaggagcaauugaucgaugggauuuuguacgcuuuccaggaacagaccaccgaggacguggucauguugaaugguuucggcacgaucgucaaucaacuaggcaaacgcgucaaacccuaccugccacaaauuugcgguacgauuuuauggcguuugaacaacaaaucggccaaagugcgccagcaggcggccgauuugauaucgcgcauagccgucgugaugaagaccugccaggaggagaaacugaugggccauuugggcgucgugcucuacgaguacuugggcgaggaguacccggaaguuuuggguuccauuuugggcgccuuaaaggccaucgugaacgucauaggcaugaccaaaaugacgccgcccaucaaagaucuccugcccagacucacgccgauccucaagaaccgacacgaaaagguccaagagaacugcaucgauuuggugggucgcauagccgaucgagggcccgaauacguaucggcgcgcgaauggaugcgcaucuguuucgagcuauuagaacugcucaaagcccauaaaaaagccauucgaagggccacggugaacacguucgguuacauagccaaggccaucggaccucacgacguuuuggccacguugcugaauaaccucaaaguacaagaacgucagaauagggugugcacgaccgucgccauugccaucguagcggagacuuguucgccuuuuacgguacugccggcguugaugaacgaauacagggugcccgaauugaacgugcaaaacggcguguugaaaucguugucguuucuguucgaauacaucggcgaaaugggcaaggauuacauuuacgcgguggccccguugcuggaggacgcucucauggauagggauuugguacacaggcaaacggcgugcgcggccaucaagcacaugucccuuggaguguacggauucgguugcgaggacgcucuggugcaucuuuugaacuacguguggccgaacauauucgaaacaucgccgcauuuggugcaggccuuuauggacgccaucgaagguaugcggguggcccugggaccgguuaaaauacuccaauacacccugcagggauuguuccaucccgcuaggaagguacgcgacguguacuggaagaucuacaauuccuuauacaucggaggccaggaugcucucguugcugguuauccgaggaucaugaacgauccuaaaaaucaguacguuagauacgaguuggauuauauauuguga

SEQ ID NO: 477 - RNA, 804 nt, Phyllotreta atra
auguccaaaguaaaugaaguugcugauuuauacaaacaauugaaaucagaauggaauaccaaaaacccaaacuuaaguaaaugcgagaaacuccugucucagcugaagcuggaauuaaccaauuugauguuucugccaacuucaacagcgaccgcuacgaagcaggaauuacuucuugcacgcgaugucuuagaaauagggguacaauggaguguagcagccaacgauauaacagcauucgaaagauauauggcucaauugaaaugcuacuauuucgauuacaacaaccagcuucccgaaucugcguucaaguaucaauuacugggauugaaucuucuguuucuauuaucgcuuaacagaguggcugaauuucacacagaguuagaacuucuaccggcugaucacauacagaacgauguguacauaaggcauccuuuaucgauugagcaauauuuaauggaaggaaguuacaauaagauauuccuugcgaaagguaauguuccugcagccagcuacaccuuuuuuauggacauacugcuugauacgauucgaguugagauugccgauuguuuaucaguagcuuaugaaaaaauaucuguaaaggauuuuacaagaaugcucuauuugccgaaugaagaagcagccaagacuuuugccaaaaaggcuuuccaaaauaaggcuuggaaaauagaccaugacuacuucuauuucauucccgaacagaaaacucaugaaccuauuccuucgaaggaacuggcccagcaagcaauugaauacgcuaaggaacuugaaaugaucguuuaa

SEQ ID NO: 478 - RNA, 432 nt, Phyllotreta atra
augggucggaugcacgcccccgguaaagguaucgcccaaucggcuuugcccuacagaagcaguguccccacguggcucaaaguaacccccgaagaagugaaagagcacaucuucaaauugggcaagaaaggccucacgccgucccaaaucggugucauccuuagggauuccuacggaggggcccaaguaaguuucgucuccggcaacaauauccuccgcaucaugaaggccaugggccuggcgcccgaccuccccgaggacuuguacuaccucaucaagaaggcaguggccauccgcaagcacuuggagaggaacaggaaagacaaggacagcaaguuccgcuugaucuugguagagucucguauccaccggcucgccagguacuacaagaccaaaacaguccuagcccccaacuggaaauacgacucgaga

SEQ ID NO: 479 - RNA, 696 nt, Phyllotreta atra
auguucaccacucgccagguuggcaaaaccuuggucaaccguacccaagguaccagaaucgcuucugaaggccugaaauucagagucuucgaaguuucguuagccgacuuacagaacgauaaugaugccgaaaggucuuucaggaaguuccguuugauugcugaagauguucaagguagaaacguauuaaccaauuuccaugguauggacuugaccacggauaagcugcgaucgaugguuaagaaauggcagacucuuauugaagcuucggcugaugugaaaacuuccgauggguuuuugcuuaggguauuuuguauugguuucaccaacaaagaucagcauucccaaaggaaaacgugcuaugcccagcauacacaaguuagagcuauucgcaagaagaugguggagaucaucacccgugacauccagggcuccgacaucaaagaaguagucaacaagcugcuucccgacagcauagcuaaggauaucgagaaggccugccaagguauuuacccgcuucacgaugucuacauucguaaggugaaggugcucaagaagccgcguuucgaccuuuccaaauuguuggaauugcacggcgacggcggcaaagggggcgccggugaagcuggcggcgaaggcgguucuaaaguagauaggccagagggauacgaaccacccguacaagaaacgguguaa

SEQ ID NO: 480 - RNA, 831 nt, Phyllotreta atra
augagcuacguuuuguguccggaaaaacaagagccaggauuuucguucgaaaacugcaaaagaaaugccuuacuggaaagcaagggauuuaccacucccaaggcgauaaagacagguacuacaaucguagggauaguuuacaaagauggcgugauacuuggggcugauacucgagcuacagaagacaccacaguggccgauaaaaacugcgaaaaaauccacuuuuuggcuccaaauauguauuguuguggugcaggaacugccgcagacaccgaaaugaccacucaaaugguagcagcgcaacuggaauugcacaagcucuacacgaauagagaagcucgcguagccacagcuaaccagcuccugaagcaauauuuauucaguuaccaagguuacauuggagcugcgcugauccuuggaggcguagacaucgaagggccccauuuacacaugaucuauccucacgguucuagcguggauuugccuuacgcuacuaugggauccgguucauuagcugcuauaucgguguuugaguuagguuggaagccggagaugggagaagaagagggcauucagcucguuagaaacgcuauagcugcugguaucuuuaacgauuuaggaucugguuccaacguugauguauguaucauacggaagggaguaguagacuacagaaggacuuaugaugaagccaauaagaaaggcguaagacaaggaucuuauaaauuccccaggggugcuacggcuguuuuguccacuaaagugguugauguagaggaaguuucugucacuccaauugaagcugaaagaauggauguugccgcuuuuuaa

SEQ ID NO: 481 - RNA, 576 nt, Phyllotreta atra
auggcgcccguagcgaagccuaaggaaucuaaagacaaaagagaugucaaggauaaaaccaaaaaucauaugcgagaauugcauauccgcaaacuaugccuuaacauuuguguaggagaaucuggugacagacuuacucgugcugcuaagguauuagaacaacugacuggucaacaaccaguuuucuccaaagccagauacaccgucaggucuuuuggaauucguagaaacgaaaaaauugcugugcacugcacaguaagaggcgcgaaggccgaggaaauauuagaaaggggcuuaaaagucagagaauacgaauugaggagggauaacuucucuaucucugguaacuucgguuucgguauccaagaacacauugaucuuggaaucaaguacgacccuagcauagguauuuacggucuugauuucuacguuguauugggucgccccggcuucaacguagcccaccgaagagcgaagaagggaaaaguugguuucucucauagguugaccaaagaagacgcuaugaagugguuccaacagaaauacgacggaauaauuuuagcgaguaaaaaauag

SEQ ID NO: 482 - RNA, 459 nt, Phyllotreta atra
auggcuuuggugauuccagagaaguuucaacacauucuccguauccucgguacgaauaucgauggaaaaaggaaagugcaauucgcccucaccgccaucaagggugucgguaggcguuauuccaauauugucuugaaaaaggcagaugugaauuuagacaagagggccggagaauguucugacgaagaaguugaaaagaucauuaccauuaugucuaauccucgucaauacaaaaucccugacugguucuugaacagaccgaaggacauuauugaugguaaauacagucagcugacuucuucaagucuugacucgaaguugcgugaggauuuggaaaggcugaagaagauccgugcgcacagagguaugagacacuacuggggucuccgugugagaggucaacacacuaaggcuaccggacgucguggacguaccguugguguguccaagaagaaguaa

SEQ ID NO: 483 - RNA, 876 nt, Phyllotreta atra
augucauccaaugcacaaaaagcucagcaauuaauagcugaagcugagaagaaagugucgucaaggggauucuucgguucucuuuucggaggguccagucgcaucgaggaugcaguggaauguuaccaaagggcugcgaauuuguuuaaaauggcgaaaaauugggaugcugcuggaaaagccuuuugugaagcagcaaacuugcauucgagaagcggggcucgucaugaugcugcaacuaauuuuguggacgcggccaacugcuauaagaaagcugacaucagugaggcuguuaauugcuugcugaaagcuauagaaaucuauacagacaugggaaaauuuacgauggcggccaaguaccaucaaaacauugccgaaauguacgagacugaucccguugaccuagaacgagccguucagcacuacgaacaggcugcggacuacuuccgaggagaagagagcaauucauccgcaaacaaaugucuucuaaaaguuggccaguacgcagcgcagcuggaaaacuacgaaaaagcaauacaaaucuaccaagaaguagcuuuuucagcuuuagagaguucccuguuaaaauacagugcuaaggaguaccuguucagggcugcucucugccauuuauguguggauauucucaaugcccagcaugcuguagaaaguuauauucaaagguauccugcauuucaagauucccgggaauauaaauuguugaaaacguugauggaacacauugaagagcagaauguugauggauauacagaugcugucaacgauuaugauucuaucucucguuuagauccuugguauacuacaaucuugcugcguauuaaaaagcaacuuaaugagagucccgauuugcguuaa

SEQ ID NO: 484 - RNA, 372 nt, Phyllotreta atra
augccgccuaaaacuaguggaaaagcagcaaagaaagcugggaaagcccaaaagaacauuuccaaagccgauaaaaagaagaaaaggaggaggaaggaaaguuacgcaaucuacauuuacaaaguuuuaaagcaaguacaucccgacaccgguauuuccaguaaggcgaugaguauuaugaacaguuucgugaaugacaucuucgaaagaauugccgcugaagcuucucgucuggcucauuauaacaaacgaucuacuauuacuaguagagaaauccaaacugcugugcgucugcugcuucccggugaacuugccaaacacgcuguuagugaaggaacuaaggcuguuaccaaguacaccaguucgaaauaa

SEQ ID NO: 485 - RNA, 354 nt, Phyllotreta atra
auggcuagucaucaaagccacgguguccaacagcuucuagcagccgaaaagcgggcugcggacaaagucacagaggccagaaaacguaaagcgaggaggcugaagcaggccaaggaagaggcccaggacgagaucgaaaaguaccgcaaggaaagggagcgccaguuccgcgaguucgaggccaagcacaugggcuccaaggaggacgucgcugcgaagaucgaccaggacaccaagcgaagaaucgaggauaugaacaaggcuauccagagccagaaggaacccgugauucgaaacaucuuggaauugguguacgacaucaagccggagauccacaagaacuaccgucaauaa

SEQ ID NO: 486 - RNA, 381 nt, Phyllotreta atra
auggcuggacgcggaaagggcgguaaggcgaagagcggcggaaaggcgaaaucgcguucgucgcgcgccggacuucaauucccggucggacgucuucaucgucuguugcgcaaaggucauuacgccgagcgcguuggcgccggugcacccgucuaccuggcugccguauuggaauaccucgccgcugaaguucucgaguuggcuggcaacgcugcccgugacaacaagaagacgcgaaucaauccgcgccacuugcagcuggcgguucguaacgacgaagagcucaauaagcugauggcuggcgugacaaucgcucaaggcgguguccucccuaacaucaacgccguucugcugccuaagaagaccggcgcggaagccuaa

SEQ ID NO: 487 - RNA, 5688 nt, Phyllotreta atra
auggcugcaacagauagcaaggcuccgcuuagaacugugaaaagagugcaguuuggaauacuuagucccgaugaaauucgucggaugucgguuacagaagggggcauccgcuuuccagagaccauggaagcgggucgccccaaaaucugcggucuuauggauccaaggcaaggcgucaucgacagaagcucccgaugccagacaugugcuggcaacaugaccgaauguccaggccacuucggacacgucgauuuagccaagccaguauuucacauaggauucauaacgaaaaccauaaaaauccucagaugcgugugcuuuuucugcagcaaacugcugguuagcccuaacaaucccaaaaucaaagaaauuguaaugaagacgaagggucaaccgaggaaacgacucacguuuguguacgaucugugcaaagguaaaaacauuugcgaaggaggagacgagauggaugucggcaaagaaggcgaugaaaguaaaaaggccggccacggaggaugcgguagauaucagccgaauaucaggagaaucggucuggauuuaacggccgaauggaaacaugucaacgaagacacgcaggagaaaaaaaucgcucuaucggccgaaaggguuugggaaauacugaagcacaucacugacgaggaaugcuucauucucggcauggaucccaaguuugccaggccugacuggaugauuguuacaguauugccugugccgccuuuauccguacguccugccguugugauguacggaucggcuagaaaucaagaugauuugacucacaaauuagcggauaucauuaaaucuaauaacgagcugcagaagaacgaggcugccggugccgcugcucacauuauuacugagaauauuaaaauguuacaauuccauguggccacguuggucgauaaugacaugcccgguaugccuagggcgaugcaaaaaucuggaaaaccucuaaaagccauuaaagcucgcuugaagggcaaagaagguaggaucagagguaaccuuauggguaaacgugucgauuucucagcuagaaccgucauuacuccugauccgaauuugcgaaucgaucaaguuggcauuccuagaaguauugcacaaaacaugacguuuccggaaaucguuacaccuuucaauuuugacaagauguuagaguugguccagagagggaauucucaauacccaggagccaaauauauuauuagagacaacggagaaagaauagauuugagauuucacccgaaaccuucagauuuacaucugcaaugggguuauaaaguugaaaggcacaucagagacggcgauuuggugauauucaaccgacaaccuacucuccacaaaaugaguaugaugggucacagggugaaaguuuugccuuggucgacguuucgcaugaauuuaucgugcacaucgccuuacaacgccgauuucgacggcgacgaaaugaauuuacacguaccccaaagcauggaaacuagagccgaaguggaaaauauccacaucacacccagacagauuaucacaccacaagccaacaaacccgucaugggaauuguacaggauacauuaacagcaguuagaaaaaugaccaaacgagacguguuuauagagaaggaacaaaugaugaauuugcuaauguucuuaccuauuugggaugguaaaaugccccguccagcuaucuuaaagcccaagccucuguggaccgguaaacaauuauuuucucuuauuauucccggaaacguaaauaugaucagaacgcacucuacucaccccgaugaggaagacgacgguccuuauaaguggauaucuccuggagauacaaaaguaaugguagaacacggugaauuaguaauggggauauuguguaagaaaacucuugguacaucagcagguucacuccuucauauuuguauauuggaguugggucacgagguuugcggaagauuuuaugguaacauccaaacggucaucaacaauugguugcuacuugaaggucauaguaucgguaucggugaugcaauugccgauccucagacguacacugaaauucgaagagccauuaagaaagccaaagaagauguaauagagguuauacaaaaagcucacaacauggaacuggaaccaacacccgguaauacguugcgucaaacauucgagaaucaaguaaacaggauauugaacgaugcccgugacaaaacuggagguuccgcgaagaaaucuuuaacugacuacaauaauuuaaaagccauggucguaucggguuccaaagguuccaacaucaacauuucacagguuaucgcuugugugggccaacagaacgucgaagguaaacgaaucccguucggcuucagaaaacgcacguugccgcacuucaucaaagacgauuacggucccgagucgagggguuucguagaaaauucguaucucgccggucugacgcccuccgaguucuauuuccacgcuaugggaggucgugagggucucaucgauaccgccguaaaaaccgcagaaacugguuacauucaacgucgucugaucaaagccauggagagcguuauggugcacuacgacggcaccguaagaaauucgguaggucaauugauccaguugagguacggcgaagacggccuuugcggugaaauggucgaguuucaaacucuauccacggugaagcucagcaacaaagcuuucgagaggaaauucagauucgaucccagcaacgaacgcuaucuucgaagagucuucaacgaagagguaaucaagcaauugauggguuccggagaggugauuuccgagcucgaaagagaaugggaccaacugcaaaaggaccgagaagcucuucggcagauuuuccccagcggugaauccaaagucguacugccuuguaauuuacaaagaaugauuuggaacguacagaaaaucuuccacaucaacaaaagagcaccgacugauuuaucgccccuuagggucauacaaggcguaagggaguuguugaaaaaaugcauuaucguggcaggagaggaccgucugucgaagcaggccaacgaaaacgcuacgcuuuuauuccaaugucuaguacgcuccacguuguguacuaaaugcguuucggaggaguucaggcuuaguacggaggcguucgaaugguugauuggagaaauagaaacccguuuccagcaagcucaagugaauccgggcgaaauggugggcgcucuugccgcccaaucuuugggcgaaccugccacccaaaugacauugaacaccuuccacuuugcugguguaucaucgaaaaacguaacucucggugugccgagauugaaggaaauuauuaacaucucgaagaaaccuaaggcucccucuuuaacuguauuuuuaacuggugucgcugccagagaugccgaaaaagccaagaauguguuaugucgacuugagcacacuacucuacguaaaguuacugcgaacacugcuauuuauuacgaucccgauccgcaaaauacagucauuccggaagaucaggaauucguuaacguuuauuacgaaaugcccgauuucgaucccacccgcauaucaccguggcugcugcguaucgaauuggacaggaaaagaaugaccgauaaaaaacucacuauggaacaaaucgcugaaaaaauuaacgccggcuucggggacgaucucaauugcauuuucaacgacgacaaugcggagaaauuggugcugcgcauucgaauuaugaacagcgacgaugagaaauucggagaagacgaggauguggacaaaauggacgaugacauguuccucagaugcaucgaggcuaauaugcugagcgacaugacacuccaaggcauagaagccauuucaaaagucuacaugcauuuaccacaaacagacgcgaagaaacgcauaguaauuacggauacuggcgaauucaaggcuauugcugaaugguugcucgaaacagacgguaccaguaugaugaaaguccugucggagagagauguagaccccguuagaacguuuucgaacgauauuugcgaaauauuuucgguguugggaauagaagcuguucgaaaaucagucgaaaaagaaaugaacgccguacuucaauucuacggucuguacguaaacuacagacaucucgcucugcuuugcgauguuaugacggccaaaggacauuuaauggccaucacucgucacgguauaaacagacaagauacgggagcgcugaugagaugcuccuucgaggaaaccgucgacguacugauggacgcguccagucacgccgaagucgauccgaugagaggcguaucggagaacaucauucucggccaauugccgaggaugggaacuggcuguuucgacuuguuguuggacgccgacaaauguaaaaugggcauaccuauaccucaagcucacaguucggaucucaugacguccggcauguucuucggcucggcggcgacgccgagcagcaugagccccggcggugcuaugacuccuugggcuaaugccaauacgccuuauguaggcagugaguggucgccacaaaauaugauggguagugguaugacaccaggaggagcagcguuuucucccucugcggcaucagaugcuucuggaaugucaccagcuuacggagcuuggucuccgacgccucaaucuccugcuaugucuccuuauauggcgucuccucacggccaaucgccuucuuacaguccuucgaguccggcauucauacccaccucgccgucuaugacgcccacaucgccgggauauucuccaaguucuccagguuauucgccuaccaguccuaauuacaguccgacgagucccaguuacucuccgacaucuccgaguuauucaccgacgucgccuaguuacagcccgacgucuccuagcuauucgccuacuucuccgaguuacaguccuacaucuccuaguuacucaccgacgucgccgaguuauaguccaacgucuccgaguuacucgccuacuucuccuaguuacaguccuacgucuccgaguuacucgccgacgucgccgaguuauaguccaacaucuccgaauuauucgccuacaucuccgaauuauucgccuacaucuccgagcuauucgucgacgucucccaguuacucgccgacaucuccgaguuacagccccagcucgccuaguuacucaccaucgucuccuagguacacuccggccucgccuaauuauuccccgacaucgccgaguuacucaccaucgucgccgcaauacucgucggccucuccgagcuacucgccguccucgccgaaguacucgccgacgaguccgagcuacucgcccacgucgccaucguucgccggcggcaguccgcaguacucgccgacgucgccgaguuacucgccgaccaguccgaguuacucgccgucgagcccgcaacauacgccggccgguagcucgcgguacucgcccaguucgccgaauuacucgcccagcucgccgagcuacucgccgacuucgccgcaguauucgccgcgcaguacgaaguauucgccgacgucgccuacguauacuccgacgaguccgaguuacucgccggcgucgcccgcguacucgccucagccgccuagguauucgccuucgucgccuagcuacucgccgacuaguccuggccaggacaacgauuaa

SEQ ID NO: 488 - RNA, 477 nt, Phyllotreta atra
augaaagcuaaaggagaguugaaagaguaugaagucaucgggcgcaaguugcccacagaaaaggagccuaaaacuccuuuauauaaaaugaggaucuucgcucccgaucaaauuguggccaagucucguuucugguauuucuugagacagcuaaagaaguucaagaaagcuaccggugagaucgucucggucaaacccauuccagaaaaaacucccaccaaaaucaagaacuuugguauuugggugagguacgacucucguucaggaacucacaacauguacagagaauauagagauuugaguguuuccggugcuguaacucaaugcuacagagauaugggagcuagacaucgugcuagagcucauucaauucagauuauuaaaguggagcaagucaaggcgagcgacaccaggaggccacaugugaaacaauuccacgauucgaggauucgguucccguugcccaaacguauccag

SEQ ID NO: 489 - RNA, 408 nt, Phyllotreta atra
auggguaaaauaaugaaauccgguaaagucguguugguccuagggggccgauacgccggcaagaaagccguagugauuaaaaccugcgacgauggcacgucugacaaacaauacggacacgcucuagucgcuggcaucgacagguaucccaggaaaauccacaagcguaugggcaaaggcaaaaugcacaaaagguccaagauuaagccuuucaucaaaguuuuaaacuacaaucacuugaugcccacuagguauucgguagauuuagcauccgauuuaaaaguaaccgcuaaggauuugaaagacccgaugaagaggaagaaggcucguuuccagacccgagugaaguucgaggaaagguacaagcagggcaagaacaagugguucuuccagaaauugcgguucuag

SEQ ID NO: 490 - RNA, 405 nt, Phyllotreta atra
auggcuauaagaccaguuuaccgaccuaaaauugucaagaagaggacgaagaaguucauaaggcaucaguccgacagguacucgaagcuaaagcguaacuggcguaaacccaaggguauugacaacaggguaagaaggagauucaagggccaauauuuaaugccaaauauugguuauggaucagcaucuaaaacuaggcacaugcuaccuacagguuuuagaaaaguguuggugcacaacguuaaggaacuagagguucuacucaugcaaaaucguaaauacugugcugaaauagcucacggugugucaucuaaaaaacgcaaagauaucguugagcgugcucaacaauugagcauuagagucaccaauggacacgcuagauuacguagccaagagaaugaguag

SEQ ID NO: 491 - RNA, 420 nt, Phyllotreta atra
auggcgaacacgaacaccgaucuaaucgaagaagacgccgccgacuugcaguuccccaaagaguucgaaaacgccgaaacucuacuuauaucugaaguucacaugcugcuggagcauaggaaagagcaaaacgaaucucuggaggaugaacaagaauuuucggauguguucaugaaaacucucacuuacacggacagauuuagaaaauucaagaacaaagaaaccauaucggcugugaggaauuuauugaugcaaacgaaaaagcugcacaaguucgaacuggccgccaucgcgaaucugugcccggaaaccaccgaggaggccaagucucugauaccaucgcuggagggccguuuggaggacgaggaacuccaaucgauuuuggacgauauucagacgaaaaggagcauacaauauuaa

SEQ ID NO: 492 - RNA, 2064 nt, Phyllotreta atra
augucuuauaaaagaaaagcagauucgcaaauccccgcugaagagagugaucaacuaauuauacgaccacuuggagccggucaagaaguaggacgaucaugcauuaugauugaauuuaaagggaaaaaaaucauguuggauugugggauacauccaggccuauccgguauggaugcucuaccauucguugacuuaauugaagccgaugaaaucgauauacuacuuauaucccauuuucaucucgaucacagcggagcauugccuugguuucuguuaaaaaccagcuucaaaggccguuguuucaugacccaugcuacaaaggcuauauacagguggcuguugucugacuacauuaaagucaguaauauugccacggaacaaaugcuauacacagaagccgauuuggaagccagcauggauaaaaucgaaacgauaaauuuccacgaagaaaaagauguacuggguguuaaauuuugggcuuacaacgccggacacguucuaggagcugcuauguucaugaucgaaauagcugguguuaaaauauuguauacuggagauuuuucucgacaagaagacaggcauuuaauggcugcggaaauacccacgauacauccggacgugcuaauaacggaaucuacuuaugguacacauauucacgagaaaagggaggaucgcgagacucguuucacuacauuaguaaacgauaucguaaauagagguggaaggugucuuauaccaguauuugccuuaggaagagcacaagaauuguugcuuauuuuggaugaauauuggagucaacaucccgaacuccacgacaucccgaucuauuacgcuucaucguuagcgaagaaaugcauggcaguguaucagacuuacauaaacgcuaugaaugacaaaaucaagcgacaaauagcgauuaauaauccguuuguauucaaacauauaucuaauuuaaaggguauugaucauuuugaugauauuggaccgugcguggugauggccuccccugguaugaugcaaagcgguuuguccagagaacuguucgaaacuugguguacugaugcgaaaaauggaguuaucauagcagguuacugugucgaaggaacguuagcuaaaacaauuuuauccgaaccagaagaaaucaccacaaugguggggcaaaagcuacccuuaaaaaugucuguugauuacauaucauuuucugcucacacugauuaccagcaaacuagcgaguuuauacgaauguugaaaccuccucaccuaguguuaguucauggugaacaaaacgaaaugagucguuugaaagccgcccuacagagggaguacgaagaugauaacaccaccucaauuaacauauacaauccgagaaacacgcauucagucgaauuguacuucagaggcgagaaaacggcgaaggugaugggccaacuggccgucgaugagccccaaacuggcaaaacuuugaacgguauauugguaaaaaggaauuuuaauuaccacgugcugucgcccgaugauuuaccgaaauauaccgaucugaauauaagccaaauauuacaaagacaaaguuugcauuacuccggcaacagcgggguuuugagauacaugauaucgcaaguagccgguuuauuggagucgauagacggggagaagaaaaugcgugccuucaaugcaguagauauaauaauugagaauaaaaucgucguuuuagaguggguggcgaaucccgugaaugauauguacgcagaugcgauaguggcugcgauuuugcaagcugauuuguuggaagugcccauuaaaaacguaacgacaucgguuaaaauggacaggaugcauuucaaggagugccugaucgagaugcugcaggacauguucggagaagauucggugcccaaaauauucaagggagaaaaauuguauguugcugugaaugauaaacgagcggauauugaucucaauaauuuggaugugaaaugucccgaagacgaaaccuuccagcaaaucguccaaacugccgugacgaaauuguaccagucguuggcuccuccacaauucgaguccuag

SEQ ID NO: 493 - RNA, 3990 nt, Phyllotreta atra
auggacaacauuccgcguacgcacgaagauaucgaggcgcaaauacgcgagauccagucgaagaagaaagaggccgccccgucggagucgccgcccgagaagguagcgaaacuaggcgaagggggauacuucgacagcgacauauacgagggcaagggcaaguacgaaggguacguaacuuccauagcagccaacgaugaagucgacgaugaggaggaagaugugggguacacgcacaaaaggcccggacugggagcccccguagcccuuuuaaacgacgucgcucaaagcgauaaagauuacgauccguucgcagaccgccgaagaccuaccauagcugauagagaagaugaguauaggcaaaaacgaagaagaaugauuauuucuccggaaagaguggauccguuugcugacgguggaaaaacgcccgauguccaagcgagaaauuacucgaaaauuaugaaagaacaaaugcugaaaggcgaagaauuggagcuucguaaaaaaaucauagaaaaauccaaggacggcucucucaaagcgaccaacggcgaugccaccaaaucagcggcgccgaagaaaaggggccgaugggaucagaccgucgacgacgccguggugccccaaaaaaagaaaacccucagcguaucuaccagcaguagcgccgcgacgcccguuugggaaggagacaaaacuccggcggacauccguugggacgagacgccgggccacaagggcagcgaaacgccgggcgcgacgcccggccaauccacccgcaugugggacgccacgccgggaccggcgacgccgggcagagagacgccgggccacucgggcgacaagagcacgucgcggcgcaaccguugggacgagacgcccaagaccgaacgcgaaacgccggggcauucgagcgguugggcggagacgcccagaaccgaucgaaucggcgccgauuugauacaggaaacgccgacgcccggugcgucgaaacgucgcuccaggugggacgagacgccgucggcgacgccuucgcaagccaugacgcccggcgccaugacgccuaguacuccgcacgguaccccgcacgcuacuccuacgcacggucacgccacgccgcugaugacgcccggcggcucgacgcccgucggggcgaaggccaugucgauggcgacgccgacgccgggccacuuggccuccaugacgcccgaacaacuucaagcuuauagaugggagagggagauagacgaacgcaaucggcccuacuccgaugacgaacuggacuccauguucccgccggguuacaagauccugccgccgccggccgguuacgugccaaucaggacgccggccaggaaguugacggccacgccgacgccgcuggugggcggcaccccgcagggauucuucauacagcaggaggauaagagcgccaaguacauggacaaccagccgaaggggcagaauuugccguuuaugaagcccgaagaugcgcaguacuucgauaagcugcugguggacgucgacgaggacgcgcuggcucccgaagaacaaaaggaacguaaaaucaugaaguuguuguugaagaucaagaacggcacgccgccgaugcgcaaggcggcucuacgacagaucaccgauaaggcgagggaguuuggagcggggccguuguucaaucaaauccugccgcuguugaugagccccacgcucgaagaucaagagcgacauuuguuggugaaggugaucgauaggauuuuguacaagcuggacgaucuggugaggccuuacguucacaaaaucuugguagucaucgaaccguuguuaaucgaugaggauuacuacgcgcgaguagaaggucgcgaaaucauuucuaaucucgcuaaagccgccgguuuggcgacgaugauuuccacaaugcguccggauauagauaacauagacgaauacguacguaauacaacggcuagagcuuucgcuguaguagcuucggcauuggguauaccaucuuuacugccuuuucuuaaagccguauguagaucgaagaaaucguggcaagcuagacacaccggcauaaaaauagugcaacaaaucgccauacucauggguugcgcgauucugccucacuugaaaagcuugguggaaauuauagagcacgguuuggucgaugaacagcaaaaaguucguacgaucacggcuuuaggaauagcugcucuggccgaagccgcuacgccguacgguauagaaagcuucgauuccguauugaaaccccuguggaaggguauaagaacucacagggguaaaggacuggccgcuuuccucaaagccaucgguuaccugauaccucucauggauucggaauacgccaauuacuacacgagagaagugauguugauuuugaucagggaauuccaaucgcccgacgaggaaaugaagaaaaucgugcucaaaguggugaaacaguguuguucgaccgacggcguggaaucgcaauauauaaaggaggagauccugccgcaguuuuucaagcauuucuggaaccacaggauggccuuggacagaaggaacuacaggcaacugguggauaccacgguggagauugcgaauaaaguuggagcuucggagauuaucaacagaauaguggacgauuugaaagaugaaaacgaagcguacaggaagauggugauggagaguauagagaagaucauggggaauuugggagcggccgauguggauucgagauuggaggagcagcugaucgaugggauuuuguacgcuuuccaggaacagaccaccgaagauguggugauguugaacgguuucgguacgaucguuaaccaacugggcaagcgcgucaaaccguauuuaccgcaaauuugcgguacgauccuguggcguuugaacaacaaaucggccaaagugcgccaacaggcggccgauuugaucucccgcauagccguggugaugaagaccugccaggaggagaagcugaugggccauuugggcgucgugcucuacgaguaccucggcgaggaguacccggagguguuggguuccauuuugggcgcucuaaaggccaucguaaacgucauaggcaugacuaaaaugacgccgccgaucaaagaucuccugccgaggcucacgccuauacucaaaaacagacacgaaaagguccaagagaauugcaucgauuuagugggacgcaucgccgauagggggcccgaauacguaucggcucgcgaauggaugcgaaucuguuucgaguuauuagagcugcuaaaagcccacaaaaaagccauacgaagggcuacgguaaauacguucgguuacauagccaaagcuauagguccgcacgacguguuggccaccuugcugaauaaccucaaaguacaagagcggcaaaaucgaguguguacgaccguggcuauagcgaucguggcggaaacuugcucgccuuucacgguacuuccggcgcugaugaacgaauacagggugcccgaauugaacguacaaaacggcgugcugaaaucguugucuuuucuguucgaauacauaggggaaauggguaaggauuacauuuacgcgguggcgccguugcuggaggacgcucugauggauagggauuuggugcacaggcaaacggcuugcgcagccaucaagcacaugucgcugggaguguacgguuucgguugcgaggacgccuuggugcaucuuuugaacuacguguggccgaauauauucgaaacgucgccgcauuuggugcaggccuuuauggacgccaucgagggcaugcggguggccuuggggccgguuaaaauacugcaauauacgcugcaggggcuguuccaucccgccaggaaggugagggacguguacuggaagaucuacaauucguuguacaucggaggccaggaugcucucguggcuggauauccuaggauuaugaaugaucccaaaaaucaguacgucagauacgaauuggauuauauauuguga

SEQ ID NO: 494 - RNA, 804 nt, Phyllotreta cruciferae
auguccaaaguaaaugaaguugcugauuuauacaaacaauugaaaucagaauggaauacaaaaaacccaaacuuaaguaaaugcgagaaacuccugucucaacugaagcucgaauuaaccaauuugauguuucugccaacuucaacagcgaccgcuacgaagcaggaauuacuucuugcucgcgaugucuuagaaauagggguacaauggaguguagcagccaacgauauaacugcauucgaaagauauauggcucaauugaaaugcuacuauuucgauuacaacaaccagcuucccgaaucugcuuuuaaguaucaauuacugggauugaaucuucuguuuuuauuaucgcuuaacagaguggcugaauuucauacagaguuagaacuucuaccggcugaucacauacagaacgacguguacauaaggcauccuuuaucgauugagcaauauuuaauggaaggaaguuacaauaagauauuccuugcgaaagguaauguuccugcagccagcuacaccuuuuuuauggacauacugcuugauacgauucgaguugaaauugcggauuguuuaucaguagccuaugaaaaaauaucuguaaaggauuuuacaagaaugcucuauuugccgaaugaagaagcagccaagacuuuugccaaaaaggcuuuccaaaauaaggcuuggaaauuagaccaugacuacuucuauuucauucccgaacagaaaacucaugaaccuauuccuucgaaagagcuggcccagcaagcuauugaauacgcuaaggaacuugaaaugaucguuuaa

SEQ ID NO: 495 - RNA, 456 nt, Phyllotreta cruciferae
augggucggaugcacgcccccgguaaagguaucgcccaaucggcuuuacccuacagaagaaguguccccacauggcucaagguaacccccgaagaagugaaagagcacaucuucaaauugggcaagaaaggccucacgccgucccaaaucggugucauccuuagggauuccuacggaguggcccaagugagguucgucuccggcaacaagauccuccgcaucaugaaggccaugggacuggcgcccgaccuacccgaggacuuguacuaccucaucaagaaggcaguggccauccgcaagcacuuggagaggaacaggaaggacaaggacagcaaguuccgcuugaucuugguggagucucguauccaccggcucgccagguacuacaagaccaagacaguccuagcccccaacuggaaauacgaaucgagcacggcuucggcucuggucgcuuaa

SEQ ID NO: 496 - RNA, 807 nt, Phyllotreta cruciferae
auggccgucgguaaaaauaaggguuugucgaaaggaggcaaaaaagguguuaaaaagaagguaauugauccuuucacgaggaaagacugguacgaugucaaggccccaucgauguucaccacucgccagguuggcaaaaccuuggucaaccguacccaagguacuagaaucgcuucugaaggccugaaauucagagucuucgaaguuucguuagccgacuuacagaacgauaaugaugccgaaaggucuuucaggaaguuccguuugauugcugaagauguucaagguagaaacguauuaaccaauuuccaugguauggacuugaccacggauaagcugcgaucaaugguuaagaaauggcagacucuuauugaagcuucagcugaugugaaaacuuccgauggguuuuugcuuaggguauucuguauugguuucaccaacaaagaucagcauucccaaaggaaaacgugcuaugcccagcauacacaaguuagagcuauucgcaagaagaugguggagaucaucacccgugacauccagggcuccgacaucaaagaaguagucaacaaacugcuucccgacagcauagcuaaggauaucgagaaggccugccaagguauuuacccgcuucacgaugucuacauucguaaggugaaggugcucaagaagccgcguuucgaccuuuccaaauuguuggaauugcacggggauggcggcaaaggaggcgccggugaagcugguggcgaaggcgguucuaaaguagauaggccagagggauacgaaccacccguacaagaaucgguauaa

SEQ ID NO: 497 - RNA, 831 nt, Phyllotreta cruciferae
augagcuacguuuuguguccggaaaaacaagagccaggauuuucguucgaaaacugcaaaagaaaugccuuacuggaaagcaagggauuuaccacucccaaggccauaaagacagguacuacaaucguagggauaguuuacaaagauggugugauacuuggugcugauacucgagcuacagaagauaccacaguggccgauaaaaacugcgaaaaaauccacuuuuuggcaccaaacauguauuguuguggugcaggaacugccgcagacaccgaaaugaccacucaaaugguagcagcgcaacucgaauugcacaagcucuacacgaauagagaagcucgcguagcaacagcuaaccagcuccugaagcaauauuuauucaguuaccaagguuacauuggagcugcgcugauccuuggaggcguagacaucgaagggccccauuuacacaugaucuauccucacgguucuaguguggauuugccuuacgcuacaaugggauccgguucauuagcugcuauaucaguguuugaauuagguuggaagccggagaugggagaagaagagggcauucagcucguuagaaacgcuauagcugcugguaucuuuaacgauuuaggaucugguuccaacguugauguauguaucauacggaaaggaguaguagauuacagaaggacuuacgaugaagcuaacaagaaaggcguaagacaaggaucuuauaaauuucccaggggugcuacggcuguuuuguccacuaaagugguugauguagaggaaguuucugucacuccaauugaagcugaaagaauggacguugccgcuuuuuaa

SEQ ID NO: 498 - RNA, 507 nt, Phyllotreta cruciferae
augcgagaauugcauauccgcggacuaugccuuaacauuuguguaggggaaucuggugacagacuuacucgugcugcuaagguauuagaacaacugacuggccaacaaccaguuuucucaaaagccagauacaccgucaggucuuuuggaauucguagaaacgaaaaaauugcugugcacugcacaguaagaggcgcgaaggccgaggaaauauuagaaaggggcuuaaaagucagagaauacgaauugaggagggauaacuucucuaucucugguaacuucgguuucgguauccaagaacacauugaucuuggaaucaaguacgacccuagcauagguauuuacggucuugauuucuacguuguauugggucgcccuggcuucaacguagcccaccgaagagcgaagaaaggaaaaguugguuucucucauagguuaaccaaagaagacgcuaugaagugguuccaacagaaauacgacggaauaauuuuagcgaguaaaaaauag

SEQ ID NO: 499 - RNA, 459 nt, Phyllotreta cruciferae
augucgcucguuauuccagaaaaguuucagcacauucuucgugucgucggcacaaauauugaugguaacagaaaagucauguuugcauugacugccaucaagggugugggaagacguuaugccaauauuguauugaaaaaagcugauaucgaucuugauaaacgugcuggagaaugcuccgaagaagaagucgaaaaaauugucacaauuaugacaaauccaagacaauacaaaauuccugacugguuccucaacagacagaaggauaucguugacggaaaauauucacagcucacuaguuccaauuuggauucgaaacuucgugaggauuuggagcgcaugaagaagauucgcgcccacagaggucuucgucauuauuggggucuccgugugcguggucaacacacaaagacaacuggccgacguggucguacuguugguguguccaagaagaaguaa

SEQ ID NO: 500 - RNA, 876 nt, Phyllotreta cruciferae
augucauccaaugcacaaaaagcucagcaauuaauagcugaagcugagaagaaagugucgucaaggggauuuuucggaucucuuuucggaggguccagucgcauugaggaugcaguggaauguuaccaaagggcugcaaauuuguuuaaaauggcgaaaaauugggaugcugcuggaaaagccuuuugugaagcagcaaacuuacauucgagaaguggggcucgucaugaugcugcaacuaauuuuguggacgcggccaacugcuauaagaaagcugacaucagugaggcuguuaauugcuugcugaaagcuauagaaaucuauacagacauggggaaauuuacgauggcggccaaguaccaucaaaacauugccgaaauguacgagacugauccuguugaccuagaacgagccguucagcacuacgaacaggcugcggacuacuuccgaggagaagagagcaauucaucugcaaacaaaugucuucuaaaaguugcccaguacgcagcacagcucgaaaacuacgaaaaagcaauacaaaucuaccaagaaguagcuuuuucagcuuuagagaguucccuguuaaaauacagugcuaaggaguaccuauuuagggcugcucucugccauuuauguguggauauucucaaugcccagcaugcuguagaaaguuauauucaaagguauccugcauuucaagauucccgggaauauaaauuguugaaaaccuugauggaacacauugaagagcagaauguugauggauauacagaugcugucaaugauuaugauucuaucucucguuuagauccuugguauacuacaaucuugcugcguauuaaaaagcaacuuaaugagagucccgauuuacguuaa

SEQ ID NO: 501 - RNA, 372 nt, Phyllotreta cruciferae
augccgccaaaaacuaguggaaaagcagcgaagaaagcugggaaagcccaaaagaacauuuccaaagcugauaaaaagaagaaaaggaggaggaaggaaaguuacgcaaucuacauuuacaaaguuuuaaagcaaguacaucccgacaccgguauuuccaguaaggcgaugaguauuaugaacaguuucguaaaugacaucuucgaaagaauugccgcugaagcuucucgucuggcucauuauaacaaacgaucuacuauuacuaguagagaaauucaaacugcugugcgucugcugcuucccggugaacuugccaaacacgcuguuagugaaggaacuaaggcuguuaccaaguacaccaguucgaaauaa

SEQ ID NO: 502 - RNA, 354 nt, Phyllotreta cruciferae
auggcuagucaucaaagccacgguguccaacaacuucuggcagccgaaaagcgagcugcugacaaaguuacagaggccagaaaacguaaagcgaggaggcuaaagcaggccaaggaagaggcccaagaugagaucgaaaaguaccguaaagaaagggagcgccaguuccgcgaguucgaggccaagcauaugggcuccaaggaggaugucgcuucgaagaucgaccaggacaccaagagaagaaucgaggauaugaacaaggcuauccaaagucagaaggaacccgugauucgaaacaucuuggaauuggucuacgacaucaagccggagauccacaagaauuaccgucaauaa

SEQ ID NO: 503 - RNA, 375 nt, Phyllotreta cruciferae
augucuggucgcgguaaaggugguaaaguuaagggaaaagcgaagucucguuccaaucgugccggauuacaauuuccgguaggucguauucacagauuauugaggaaaggaaauuacgcugaacgaguuggagccggugcuccgguauacuuagcugccguuauggaauauuuggcugcugaaguauuggaauuggccgguaaugcagcucgugacaacaagaaaacaagaauaauuccgagacauuugcaauuggcuauuaggaaugacgaggaauugaauaaauuacuuucugguguaacaaucgcccagggagguguucugccgaacauccaagcagugcuucuuccuaagaagaccgaaaagaaggcuuaa

SEQ ID NO: 504 - RNA, 4548 nt, Phyllotreta cruciferae
augaaaaccauaaaaauccucagaugugugugcuuuuucugcagcaaacugcugguuagcccuaacaaucccaaaaucaaagaaaucguaaugaagacgaagggucaaccgagaaaacgacucaccuuuguuuacgauuugugcaaagguaaaaacaguugcgaaggaggagacgagauggacguuggcaaagaaggcgaugaaaguaagaaggccggucacggagggugugguagauaucagccgaauaucaggagaaucggacuggauuuaacggccgaauggaaacaugucaacgaagacacgcaggagaaaaaaaucgcucuaucugccgaaaggguuugggaaauacugaaacacaucaccgacgaggaaugcuucauucucgguauggaucccaaguuugccaggccugacuggaugauuguuacaguauugccuguaccuccuuuaucuguacguccugccguugugauguacggaucggcuagaaaucaagaugacuugacucacaaauuagcggauaucauuaaaucuaauaaugagcugcagaagaacgaagccgcuggugcugcugcucacauuauuacugagaauauuaaaauguuacaauuccauguagccacauuggucgauaaugacaugcccgguaugccuagggcuaugcaaaaaucuggaaaaccucuaaaagccauuaaagcucgcuugaagggcaaagaaggcaggauuagagguaaucuuauggguaaacguguggauuucucggcuagaacugucauuacuccugauccgaauuugcgaaucgaucaaguuggcauuccuagaagcauugcgcaaaacaugacguuuccggaaaucguuacaccuuucaauuucgacaagauguuagaguugguucagaggggcaauucccaauauccaggagccaaauauauuauuagagacaacggagaaagaauagauuuaagauuucacccgaaaccuucagauuugcaucugcaauggggauauaaaguggaaaggcacaucagagacggcgauuuggugauauucaaccgacaacccacucuccacaaaaugaguaugaugggucaccgagucaaaguuuugccuuggucgacauuucgcaugaauuuaucaugcacaucgccuuacaacgccgauuucgauggcgacgaaaugaauuuacacguaccccaaagcauggaaacuagagcugaaguggaaaauauccacaucacacccagacagauuaucacuccacaagccaacaaacccgucaugggaauuguacaggauacauuaacagcaguuagaaaaaugacuaaacgagacguauucauagagaaggaacaaaugaugaauuugcuaauguucuuaccuauuugggaugguaaaaugccccguccagcuauccuaaagcccaagccucuguggaccgguaaacaauuauuuucucuuauuauucccggaaacguaaauaugaucagaacgcacucuacucaccccgaugacgaagacgacgguccuuauaaguggauaucuccuggagauacaaaaguaaugguagaacacggugaauuaguaaugggaauauuguguaagaaaacucuugguacaucagcagguucacuccuucauauuuguauauuggaguugggucaugagguuugcggaagauuuuaugguaacauccaaacggucaucaacaauugguugcuacuagaaggucauaguaucgguaucggugaugcaauugccgauccucagacguacacugaaauucgaagagccauuaagaaagccaaagaagauguaauagagguuauacaaaaagcucacaacauggaacuggaaccuacucccgguaauacuuugcgucaaacauucgagaaucaaguaaacaggauauugaacgaugcccgugacaaaacuggagguucugcgaagaaaucuuuaacugacuacaauaauuuaaaagccauggucgugucggguucuaaaggaucuaacaucaauauuucacagguuaucgcuuguguaggccaacagaacgucgaagguaaacgaauuccauucggcuucagaaaacgcacauugccgcacuucaucaaagacgauuacggucccgagucgagagguuucguagaaaauucguaucuggccggucugacucccuccgaguucuauuuccacgcuaugggaggucgugaaggucucaucgauaccgccguaaaaacugcagaaacugguuacauucaacgucguuugaucaaagcuauggagagcguuauggugcacuacgacggcaccguaagaaauuccguaggucaauugauccaguugagguacggcgaagacggccuuugcggugagauggucgaguuucaaacucuauccacggugaagcucagcaacaaagcuuucgaaagaaaauucagauucgauccuagcaaugagcgcuaucuucgaaggguuuuuaaugaagagguaaucaagcaauugauggguuccggagaggugauuuccgagcucgaaagagaaugggaccaacuucaaaaggaucgagaagcucuucggcagauuuuccccagcggugaauccaaagucguacuaccuugcaauuuacaaagaaugauuuggaauguacagaaaaucuuccacaucaacaaaagagcaccaacugauuuaucaccucuuagggucauacaaggcguaagggaauuguugaaaaaaugcauuauuguggcaggagaggaucgcuugucgaagcaggcuaacgaaaacgcuacgcuuuuauuccaaugucuaguacgcuccacguuguguacaaaaugcguuucggaggaguuuagacuuaguacggaggcauucgaaugguugauaggagaaauugaaacccguuuccagcaagcucaagugaauccgggcgaaauggugggcgcucuagccgcccaaucuuugggugaaccugccacccaaaugacauugaacaccuuccacuuugcugguguaucaucgaaaaacguaacucucggugugccgagauugaaggaaauuauuaacaucucgaagaaaccgaaggcuccuucuuuaacgguauuuuuaacuggugucgcugccagagacgccgaaaaagccaagaauguguugugucgacuugaacacacuacuuuacguaaaguuacugcgaacacugcuauuuauuaugaucccgauccacaaaauacugucauaccggaagaucaggaauucguuaacguuuacuaugaaaugccugauuucgauccaacccguauaucuccauggcugcuacguaucgaauuggacaggaaaagaaugaccgauaaaaaacuuacuauggaacaaaucgcugagaaaauuaacgccgguuucggugacgaucucaauugcauuuucaacgacgacaaugcggaaaaauuggugcugcgcauucgaauuaugaacagcgacgaugagaaauucggagaagacgaagacguggacaaaauggacgaugacauguuccucagaugcaucgaggcuaauaugcugagugacaugacacuccaaggcauagaagccauuucaaaagucuacaugcauuuaccacaaacagacucgaagaaacgcauaguaauuacggauacuggcgaauucaaggcuauugcugaaugguugcucgaaacagacgguaccaguaugaugaaaguacugucggaaagagauguagaccccguuagaacguuuucgaacgauauuugcgaaauauuuucgguguugggaauagaagcuguucgaaaaucggucgaaaaagaaaugaacgccguacuucaauucuacggucuguacguaaacuacagacaucucgcucugcuuugugauguuaugacggccaaaggacauuuaauggccauuacucgucacgguauaaacagacaagauacgggagcgcugaugagaugcucuuucgaggaaaccgucgacguacugauggacgcuuccagucacgccgaagucgauccgaugagagguguaucggagaacaucauucucggccaauugccgaggaugggaacuggcuguuucgacuuguuguuggacgccgacaaauguaaaaugggcauaccgauaccucaagcucacaguucggaucucaugacguccggcauguucuucggcuccgcggcaacuccgagcagcaugagccccggcggugcuaugacuccuugggcuaacgccaauacgccuuauguaggcagugaguggucgccacaaaauaugauggguagugguaugacuccaggaggagcggcguuuucucccucugcagcaucagaugcuucuggaaugucaccagcuuacggagcuuggucuccgacgccucaaucuccucggagucgacgagccgauccaaacggucgcaggaggaagucgaguaagaagacgaugaagaaaaagaggugguggaagcagagcgcuucuccgauuucgcauccaucaucgucacguuguucaugccguugcaacagagaaagagagagaaua

SEQ ID NO: 505 - RNA, 531 nt, Phyllotreta cruciferae
augaaagcuaaaggagaguugaaagaauaugaaguuaucgggcgcaaauugcccaccgauaaagagaaaagccccccauuguauaaaaugaggauauucucucccgacccgaucguggcuaaaucgcguuucugguauuuucugagacaacuuaggaaauucaagaagaccaccggagaaaucguuucggucaagcugguacccgaaaaaaccccuacuaagauuaagaacuuugguauaugguugagguacgauucccguuccgguacgcauaacauguacagggaauacagagaccuuagcguuucuggagcuguaacggcuugcuauagagacaugggagcucgucaucgggcuagagcacaugcuauucagauuauuaaaguggaacaaguuaagucgagcgacaccaggaggccacaagugaaacaauuccacgauucgaggauucgguucccguugcccaaacguauccaacauaagucuaugaaccgcuucucuguccgcaaacccagaacauacuucuuguaa

SEQ ID NO: 506 - RNA, 408 nt, Phyllotreta cruciferae
auggguaaaauaaugaaauccgguaaagucguguugguccucgggggccgauacgccggcaagaaggccguagucauuaaaaccugcgacgauggcacgucugacaaacaauacggacacgcucuagucgcugguauagacagguaucccaggaaaauccacaagcguaugggcaaaggcaaaaugcacaaaagguccaagauuaagccuuucaucaaaguuuuaaacuacaaucacuugaugcccacuagguacucgguagauuuagcguccgauuuaaaaguaacggcuaaggauuugaaagacccgaugaagaggaagaaggcucguuuccagacucgcgucaaguucgaggaaagguacaagcagggcaagaacaaaugguucuuccagaaauugcgguucuag

SEQ ID NO: 507 - RNA, 405 nt, Phyllotreta cruciferae
auggccauucguccaguauauaggccaacuauuaucaaaaagagaacgaaaaaguucaucagacaucaaagugaucgcuaugauaaacucaagcgaaacuggcguaaaccgaaagguauugauaacagaguucguaggcgcuucaagggucaauauuugaugcccaacauugguuacggaaguaacaaaaaaacucgucacaugcuucccacuggauuccgaaagguucucguccacaaugucaaggaacuugaaguucuuaugaugcaaaaucguaaauuuugugcagaaauugcacaugcaguuagcaguaaaaaacgaaaagaaaucguugaacgcgcucagcaacucucaauucgagugacaaaugcaacugcgcgauuacguucagaggaaaacgaauaa

SEQ ID NO: 508 - RNA, 420 nt, Phyllotreta cruciferae
auggcgaacacgaacaccgaucuaaucgaagaagacgccgccgacuugcaguuccccaaagaauucgaaaacgccgagacucuacuuauauccgaagugcacaugcugcuggagcacaggaaagagcaaaacgaaucucuggaggaugagcaagaauuuucggauguguucaugaaaacucugacuuacacagacagauuuagaaaauucaagaacaaagaaaccauaucggcugugagaaauuuauugaugcaaacgaagaagcugcacaaguucgaacuggccgccaucgccaaccugugcccggaaaccaccgaggaggccaagucucugauaccgucgcuggagggccguuuggaggacgaggaacuccaaucgauuuuggacgauauucagacgaaaaggagcauacaauauuaa

SEQ ID NO: 509 - RNA, 1959 nt, Phyllotreta cruciferae
augauugaauuuaaagggaaaaaaaucauguuggauugcgggauacauccaggucuauccgguauggaugcucuaccauucguugacuuaauugaagccgaugaaaucgauauacuccuuauaucucauuuucaucucgaucacagcggggcucugccuugguuucuauuaaaaaccagcuucaaaggccguuguuucaugacccaugcuacaaaggcuauuuacagguggcuguugucugauuacauuaaagucaguaauauugccacggaacaaauguuauacacagaagccgauuuggaagccaguauggauaaaaucgaaacaauaaauuuccacgaagaaaaagauguacuggguguuaaauuuugggcuuacaacgccggacauguacuaggagcugcuauguucaugaucgaaauagcuggugucaaaauauuguauacuggagauuuuucucgacaagaagacaggcauuuaauggcugcggaaauacccacgauacauccggacguguuaauaacggaaucuacuuaugguacgcauauucacgagaaaagggaggaucgugagacucguuucacuacacuaguaaacgauaucguaaauagagguggaaggugucucauaccaguauuugcguuaggaagagcacaggaauuguugcuuauuuuagaugaauauuggagucaacaucccgaacuccacgacaucccgaucuacuacgcuucaucguuagcgaagaaaugcauggccguguaucagacuuacauaaacgccaugaaugacaaaaucaagcgacaaauagcgauuaauaacccguuuguauucaaacauauaucuaauuuaaaggguaucgaucauuuugaugauauuggaccgugcguggugauggcaucacccgguaugaugcaaagcggcuuguccagagaacuguucgaaacuugguguacugaugcgaaaaauggaguuaucauagcagguuacugcgucgaaggaacuuuagcuaaaacaauauuauccgaaccagaagaaaucaccacaaugguggggcaaaagcuacccuuaaaaaugucuguugauuacauaucauuuucugcucacacugauuaccagcagaccagcgaguuuauacgaauguugaaaccuccucaccuaguguuaguucauggcgaacaaaacgaaaugaaucguuugaaagccgcccugcagagggaguacgaagaugauaacaccacuucgauuaacauauacaauccgagaaacacgcauucagucgaauuguacuucaggggcgagaaaacggcgaaggugaugggacagcuggccgucgacgagccccaaacuggcaaaacuuugaacgguauauugguaaaaaggaauuuuaauuaccacgugcugucgcccgaugauuugccgaaauacaccgauuugaauauaagccaaauauuacaaagacaaaguuugcauuacucuggcaacagcggaguuuugagauacaugauaucgcaaguagccgguuuauuggaguccauagacggggagaagaaaaugcgcgccuucaaugcaguagauauaauaaucgaaaauaaaaucgucguuuuagaguggguggcgaaucccgugaaugauauguacgcagaugcgauaguagcugcgauuuugcaagcggauuugcuggaagugcccauuaaaaacguaacgacaucggugaaaauggacaggaugcauuucaaggagugccugaucgagauguugcaggacauguucggagaggauucggugcccaaaauauucaaaggggagaaguuguauguugcugugaaugacaaacgagcggauauugaucucaauaauuuggaugugaaaugucccgaagacgaaaccuuccagcaaaucguucaaacugccgugacgaaauuguaccagucguuggcuccuccacaauucgaauccuag

SEQ ID NO: 510 - RNA, 3990 nt, Phyllotreta cruciferae
auggacaacauuccgcguacgcacgaagauaucgaggcgcaaauacgcgagauccagucgaagaagaaagaggccgccccgucggagucgccgcccgagaagguggccaaacuaggcgaaggcgguuacuucgacagcgacauauacgaaggcaagggcaaguacgaaggguacguaacuucaauagcagccaacgaugaagucgacgaugaggaagaagaugucgguuacacgcacaagaggcccggacugggagcccccguagcccuccuaaacgaugucgcucaaagcgauaaagauuacgauccguucgcagaccgccgaagaccuaccauagcugauagagaagaugaguauaggcaaaaaagaagaagaaugauuauuucuccggaaagaguggauccguuugcugacgguggaaaaacgcccgacguccaagcgagaaauuacucgaaaauuaugaaagaacaaaugcugaaaggcgaggaauuggagcuucguaaaaaaaucauagaaaaauccaaggacggcucucugaaagcgaccaauggcgaugccaccaaaucagcggcgccgaagaaaagaggccgaugggaucaaaccgucgacgacgccgugguaccgcaaaaaaagaaaacccucagcguaucuaccagcagcagcgccgcgacgcccguuugggaaggcgacaaaacgccggcggacauccguugggacgaaacgccgggucacaagggcagcgaaacgccgggagcgacgcccggccaaucuacgcgcaugugggacgccacuccgggaccggcaacgccgggcagagaaacgcccggucauuccggcgacaagagcacgucgcggcgcaaccguugggacgagacgcccaaaaccgaacgcgaaacgccgggacauucgagcgguugggcggagacgccccgaaccgauagaaucggcgcugaucucauacaagaaacgccgacgcccggagcaucgaaacgucgcuccagaugggacgagacgccgucggcgacgccuucucaagcuaugacacccggcgccaugacgcccaguacuccucacgguacaccgcaugcuacuccuacgcacggucacgccacgccuuuaaugacgcccgguggcucaacgccugucggggcgaaggccaugucgauggcuacuccgacgcccggccacuuggccuccaugacgcccgaacaacuucaagcuuauagaugggagcgagagauagacgaacgcaaucggcccuacuccgaugaugagcucgacuccauguucccgcccggguacaaaauccugccgccuccugccggcuacgugcccauccggacgccggccaggaagcugacggccacgccgacgccgcuagugggcggcaccccgcaaggauucuucauacaacaggaggauaagagcgccaaguauauggauaaucaacccaaggggcagaauuugccguuuaugaagcccgaagaugcgcaguauuucgauaaacuccugguggacgucgacgaagaugcgcuggcucccgaagagcaaaaggaacguaaaaucaugaaguuguuguugaagaucaagaacgguacgccgccgaugcguaaggcggcucuacgacagaucaccgauaaggcgagggaauuuggagcggggccguuguucaaucaaaucuugccucuauugaugagucccacgcuggaggaccaagagcgacauuuauuggugaaaguaaucgauaggauuuuguacaagcuggacgaucugguuaggccuuacguucacaaaauucugguggucaucgaaccguugcuaaucgaugaagauuauuacgcgcguguagaaggucgcgaaaucaucucuaaucucgccaaagcggccggauuggcgacaaugauuuccacaaugcgucccgauauagauaacauagacgaauacguacguaacaccacagcuagagcuuucgccguuguagcuucagcccuggguauaccaucuuugcuaccuuuucuuaaagccguauguagaucgaaaaaaucguggcaagccagacacaccggcaucaaaauaguacaacaaaucgccauacucauggguugcgcgauuuugccucacuugaaaagcuugguggaaauuauagagcacgguuuagucgaugaacagcaaaaaguucguacgaucacagcuuuggggauagcugcauuagccgaagccgcuacaccguacgguauagaaagcuucgauucgguauuaaaaccgcuguggaaggguauaaggacgcacaggggcaaaggacuggccgcuuuccucaaagccaucgguuacuugauaccgcuuauggauucugaauacgccaauuacuauacgagagaagugauguugauuuugaucagggaauuccaaucgcccgaugaggaaaugaagaaaaucgugcucaaaguugugaaacaguguuguucgaccgacgguguggaaucgcaauauaucaaggaggagauccugccgcaauuuuucaagcauuucuggaaccacaggauggcauuggauagaagaaauuacaggcaauugguggacacuacgguggagauugccaacaaagugggagcuucggagauuauaaaucgaauaguggacgauuugaaagaugaaaacgaggcguacaggaaaauggugauggagaguauagagaagaucauggggaaucugggagcggccgauguggauucgagauuggaggagcaguuaaucgauggaauuuuguacgcuuuccaggagcagacgacugaggauguggugauguugaaugguuucgguacgaucguaaaccaacugggcaaacgcgucaaaccguauuuaccgcaaauuugcgguacgauccuguggcguuugaacaacaaauccgccaaagugcgccaacaggcggccgauuugauuucccgcauagccgucgugaugaagaccugccaggaggagaaacugaugggccauuugggcgucgugcucuacgaguaccucggcgaggaguacccggaaguguuggguuccauuuugggcgcuuuaaaagccaucguaaacgucauagguaugacuaaaaugacgccgccgaucaaagaucuccugccgaggcucacgccuauacucaagaauagacacgaaaagguccaagagaauuguaucgauuuaguggggcguaucgccgauagagggcccgaguacguaucggcacgcgaauggaugcgaaucuguuucgagcuauuagaacugcuaaaagcccacaaaaaggccauacgaagggccacgguaaauacguuugguuacauagccaaagcuauagguccucacgacguguuggccaccuugcugaauaaccucaaaguacaagaacggcaaaaucgcguguguacgaccguggcuauagcgaucguggcggaaacuugcucgccuuuuacgguacuuccggcguugaugaacgaauacagggugcccgaauugaacgugcaaaacggcguacucaaaucguugucuuuucuguucgaauacauuggggaaauggguaaggauuacauuuacgcgguggcgccguugcuggaggacgcucugauggauagggauuuggugcacaggcaaacggcuugcgcugccaucaagcauaugucgcugggaguguacggguucgguugcgaggacgcccuggugcaucuuuugaacuacguguggccgaauauauucgaaacgucgccucauuuggugcaagccuuuauggacgccaucgagggcaugaggguggccuuggggccgguuaaaauucuacaauacacgcugcagggguuguuucaucccgccaggaaggugagagauguguacuggaagaucuacaauucguuguacauuggaggacaagaugcucuuguggcuggauaucccaggaucaugaacgaucccaaaaaucaguacgucagauacgaauuggauuauauauuguga

SEQ ID NO: 511 - RNA, 654 nt, Phyllotreta armoraciae
uaaaugcgagaaacuccugucucaacugaagcucgaauugaccaauuugauguuucugccaacuucaacggcaacagcuacaaagcaggaauuacuuuuagcucgcgaugucuuagaaauugguguacaauggagcguugcagccaaugacauaaccgcauucgaaagauauauggcucaauugaaaugcuacuauuuugauuacaacaaccagcuuccugagucugcguuuaaauaucaauuacuaggauugaaucuucuguuuuuauugucgcuuaacagaguggcagaauuucacacagaguuagaacuuuuaccagcugaucacauacagaacgauguguacauaaggcauccuuuaucaauugagcaauaccuaauggaaggaaguuacaauaagauauuccuugcgaaagguaauguuccugcagcaagcuacaccuuuuuuauggacauacugcuugauacgauucgaguugaaauugcggauuguuuaucaguagccuaugaaaaaauaucuguaaaagauuuuacaagaaugcucuauuugccgaaugaagaaacagcuaagaauuuugccaaaaaggcuuuucaacacaaggcuuggaaauuggaccaugacuacuucuacuuuauucccgaacagaaaacuca

SEQ ID NO: 512 - RNA, 313 nt, Phyllotreta armoraciae
uacagaagaagcgucccuacguggcugaaaguaacccccgaagaagugaaagagcacaucuucaaauugggcaagaagggccucacgccgucccaaaucggcgucauccugagggacuccuacggaguggcccagguaagguucgucuccggcaacaagauccuccgcaucaugaaggccaugggacuggcgcccgaccuacccgaggacuuguacuaccucaucaagaaagccguggccauucgcaagcacuuggagaggaacaggaaggacaaggacagcaaguuccguuugauuuuggucgagucucgua

SEQ ID NO: 513 - RNA, 622 nt, Phyllotreta armoraciae
auugguacgaugucaaggccccaucgauguucaccacgcgccaaguuggcaagaccuuggucaaccguacccaagguacuagaaucgcaucugaaggccugaaauucagagucuucgaaguuucauuagccgacuuacagaacgauaaugaugccgaaaggucuuucaggaaguuccguuugauugcugaagauguucaagguagaaacguauuaaccaauuuccaugguauggacuugaccacggauaaguugagaucgauggugaagaaauggcagacucuuaucgaagcuucugcugaugugaaaacuuccgauggguuuuugcuuaggguauuuuguauuggauuuaccaacaaagaucagcauucccaaaggaaaacgugcuaugcccagcauacacaaguuagagcuauucgcaagaagaugguggaaaucaucacccgugacauccaggguuccgacaucaaagaaguagucaacaaacuguugcccgacagcauagcuaaggauaucgagaaggccugccaagguauuuacccacuucacgaugucuacauucguaaggugaagguacucaagaagccgcguuucgaccuuuccaaauuguuggaauugcacgg

SEQ ID NO: 514 - RNA, 677 nt, Phyllotreta armoraciae
cuuacuggaaagcaagggauuuuccacccccaaggcgauaaagacagguacuacaaucguagggauugucuacaaagauggugugauacuuggggcugauacucgagcuacagaagauacuacgguggccgauaaaaacugcgagaaaauccacuuuuuggcaccaaauauguauuguuguggugcaggaacugccgcagacacugaaaugaccacucaaaugguagcagcgcaacuggaauugcauaagcucuacacaaacagagaagcccgcguagcaacagcaaaucagcuccugaagcaauacuuauucaguuaccaagguuacauuggagcugcuuugauucuuggagguguagacaucgaagggccccaucugcauaugauuuauccucacgguuccaguguggauuugccuuaugcuaccauggguuccgguucauuagcugcuauaucaguguuugaguuaggcuggaagccugagaugggagaagaagagggcauucagcucguaagaaacgcuauagcugcugguaucuuuaacgauuuaggaucugguucuaacguugauguuuguaucauacgaaaaggaguaguagauuacagaaggaccuacgaugaagccaauaagaaaggagucagacaaggaucuuacaaauuuccaagaggugcuacag

SEQ ID NO: 515 - RNA, 429 nt, Phyllotreta armoraciae
ugccuuaacauuuguguaggagaaucuggugacagacuuacucgugcugcuaagguauuagaacaacugacuggucaacagccaguuuucuccaaagccagauacaccgucaggucuuuuggaauucguagaaacgaaaaaauugcuguacacugcacaguaagaggcgcgaaggccgaggaaauauuagaaaggggcuuaaaagucagagaauacgaauugaggagggauaacuucucuaucucugguaacuucgguuuugguauccaagaacacauugaucuuggaaucaaguacgacccuagcauagguauuuacggucuugauuucuacguuguguugggucgccccgguuucaacguagcccaccgaagagcgaagaagggaaaaguugguuucucucauagguuaaccaaggaagacgcuaug

SEQ ID NO: 516 - RNA, 315 nt, Phyllotreta armoraciae
aaagaaaagugcaauucgcccucacugccauuaaagguguugguagacguuauuccaauauugucuugaaaaaggcagaugugaauuuggacaagagggccggagaauguuccgacgaagaaguugaaaaaaucauaacuauuaugucuaauccucgucaauauaaaauuccugacugguuuuugaacagacagaaggacauuauugaugguaaauacagucagcugacuucuucaagucuugacucgaaguugcgugaggauuuggaaaggaugaagaagauucgugcccacagagguaugagacacuacuggg

SEQ ID NO: 517 - RNA, 681 nt, Phyllotreta armoraciae
ggggauuuuucggaucucuuuucggaggguccagucgcauugaagaugcaguggaauguuaccaaagggcugcaaauuuguuuaaaauggcgaaaaauugggaugcugcuggaaaggcuuuuugugaagcagcaaauuugcauucgagaaguggggcucgucaugaugcugcuacuaauuuuguagaugcagccaacuguuauaaaaaagcugacaucagugaggcuguuaauugcuuguugaaagcuauagaaaucuauacagacaugggaaaauuuacgauggcagccaaguaccaucaaaacauugccgaaauguacgagacugaucccguugacuuagaacgagccguucagcacuaugaacaggcugcggacuauuuccgaggagaagagagcaauucauccgcaaacaaaugucuucuaaaaguugcccaguacgcagcacagcucgaaaacuaugaaaaagcaauacaaaucuaccaagaaguagcuuuuucagcucuagagagcucucuguuaaaauacagugcuaaggaguaccuguuuagggcugcucucugccauuuauguguggauauucucaaugcccagcaugcuguagaaaguuauauucaaagguauccagcauuucaagauucccgagaauauaaauuguugaaaacguugauggaacacauug

SEQ ID NO: 518 - RNA, 223 nt, Phyllotreta armoraciae
agccgauaaaaagaagaaaaggaggaggaaggaaaguuacgcaaucuacauuuacaaaguuuuaaagcaaguacaucccgauaccgguauuuccaguaaggcgaugaguauuaugaacaguuucgugaaugacaucuucgaaagaauugccgcugaagcuucucgucuggcucauuauaacaaacguucuacuauuacuaguagagaaauccaaacugcugug

SEQ ID NO: 519 - RNA, 236 nt, Phyllotreta armoraciae
uuacagaggcuagaaaacgcaaagccagaaggcuaaagcaggccaaggaagaagcgcaggaugaaaucgagaaguaccguaaagaaagggagcgucaauuccgcgaauucgaagccaagcacaugggcucuaaagaggauguagcuucgaagaucgaccaggacaccaagaggagaaucgaggacaugaacaaggcuauccaaagucagaaagaacccgugauccaaaacaucuug

SEQ ID NO: 520 - RNA, 250 nt, Phyllotreta armoraciae
ccggauuacaauuucccguaggucguauucacagauuauuaaggaaaggaaauuacgccgaaagaguuggugccggugcuccgguauacuuagcugcuguaauggaauauuuagccgcugaaguauuggaauuggcagguaaugcagcucgugauaacaagaaaacaagaauaauuccaagacauuugcaauuggcaauuagaaacgacgaggaauugaauaaauuacuuucugguguuacaauugcuca

SEQ ID NO: 521 - RNA, 747 nt, Phyllotreta armoraciae
uagucccgaugaaauucgucggaugucaguuacagaagggggcauccgcuuuccagagaccauggaagcgggucgccccaaaauuugcggucucauggauccaagacagggcgucaucgacagaagcucccgaugccagaccugugccgguaacaugaccgaauguccaggccacuucggccacguagauuuagccaaaccgguauuucacauuggauucauaacgaaaaccauaaaaauccucagaugugugugcuuuuucugcagcaaauugcuggucagcccuaacaauccuaaaaucaaagaaauuguaaugaagacaaagggucaaccgagaaagcgacucacguucguguaugauuugugcaaagguaaaaauauuugcgaagguggagacgaaauggaugucgguaaagagggcgaugaaaguaaaaaggccgggcacggaggaugcgguagauaucagccgaauaucaggagaauaggucuggauuuaacggccgaauggaaacacgucaacgaagauacgcaagagaagaaaaucgcucuaucggccgaaagaguuugggagauacugaaacacaucaccgacgaggaaugcuucauucucgguauggaucccaaauucgccagacccgacuggaugauuguuacaguauugccugugccuccuuuguccguacguccugccguuguuauguauggaucggcuagaaaucaagacgauuugacucacaaauuagcgga

SEQ ID NO: 522 - RNA, 403 nt, Phyllotreta armoraciae
accgauaaagagaaaagccccccauuguauaaaaugaggauauucucucccgacccgaucguggcuaaaucgcgauucugguauuuucugagacaacuuaggaaauucaagaagaccaccggagaaaucguuucggucaagccgguaccagaaaaaaccccuaccaagaucaagaacuuugguauuuggcugagguacgauucccguuccgguacacauaacauguacagggaauacagggaccuuagcguuucuggagccguaacggcuuguuauagagauaugggagcucgucaucgggcuagagcacaugcuauucagauuauuaaaguggaacaaguuaagucgagcgacaccaggaggccacaagucaaacaauuccacgauucaaagauucgguucc

SEQ ID NO: 523 - RNA, 259 nt, Phyllotreta armoraciae
aaagccgucgucauuaaaacaugcgaugauggcacgucugacaaacaauacggacaugcuuuagucgcugguauugacagguaucccaggaaaauccacaagcguauggguaaaggaaaaaugcacaaaagguccaaaaucaagccuuuuaucagaauuuuaaacuacaaucacuugaugccuaccagguauucgguagauuuagcuuccgauuuaaaagugacuccuaaagaccugaaagauccgaugaagaggaaga

SEQ ID NO: 524 - RNA, 269 nt, Phyllotreta armoraciae
aguucauaaggcaucaguccgacagguacucgaagcuaaagcgcaacuggcguaaacccaaggguauugacaacagguuaagaaggagauccaagggccaauauuuaaugccaaauauugguuauggaucagcaucuaaaacuaggcacaugcuaccuacagguuuuagaaaaguguugguacacaacguuaaggaacuagagguucuccuccugcaaaaucguaaauacugugcugaaaucgcccaugguguuucauugaaaaagcgc

SEQ ID NO: 525 - RNA, 280 nt, Phyllotreta armoraciae
auucgaaaacgcugaaacucugcuuauaucugaagugcacaugcuguuggagcaccguaaagagcaaaacgaaucucuggaggacgaacaagaauuuucggauguguucaugaaaacucugacuuacacggacagauuuagaaaauucaagaacaaagaaaccauaucggccgugagaaauuuauugaugcagacgaaaaaacuccacaaguucgagcuggcagccauagcgaauuugugcccggagaccaccgaagaggcgaagucucugauaccuucg

SEQ ID NO: 526 - RNA, 650 nt, Phyllotreta armoraciae
uuucucgacaagaagacaggcauuugauggcugcagaaauacccacgauacauccagacguauuaauaacggaaucuacuuaugguacacauauucaugagaaaagggaagaucgcgaaacucguuuuacaacauuagugcacgauaucguaaauagagguggaaggugucucauaccgguauucgccuuaggaagagcccaggaauugcuacuuaucuuagaugaauauuggagucaacaucccgaacuccacgacaucccgauuuauuacgcuucaucguuagcgaagaaaugcauggccguguaucagacuuacauaaacgcgaugaacgacaaaaucaagcgacaaauagcgauuaacaauccguuuguauucaaacauauaucuaacuugaaggguauugaucauuuugaugauauuggaccaugcguagugauggcauccccggguaugaugcaaagcgguuuguccagagaacucuucgaaaccugguguacggacgcaaagaauggaguuaucauagcagguuacugcguggaaggaacguuagccaaaacgauauuaucagaaccagaagaaaucacgaccauggucgggcaaaaauugccuuuaaaaauguccguugauuacauaucguucucugcucac

SEQ ID NO: 527 - RNA, 686 nt, Phyllotreta armoraciae
aaaguggugaagcaauguuguucgaccgacggugucgaaucgcaauacauaaaagaagaaauccugccacaguuuuucaagcauuucuggaaccacaggauggccuuggacaggaggaacuacaggcaauuggucgauacuacaguggagauugcgaacaaagugggagcuucggagauuaucaauagaauaguggacgaucugaaagacgaaaacgaggcguauagaaagauggugauggagagcauagagaagauuauggggaaucucggagcagccgauguggauuccagauuggaggagcaauugauugaugggauuuuguacgcuuuucaagagcaaacuaccgaggauguggugauguugaauggauucgguacgaucgucaaccaauuggguaaacguguaaaaccuuauuuaccacaaauuugcgguacuaucuuauggcguuugaacaacaaaucagccaaagugcgucaacaggcugcagauuugauaucccgcauagccguaguaaugaaaaccugccaggaggagaagcuaaugggccauuugggugugguccucuacgaguaucucggagaggaguacccggaaguuuuagguuccauuuugggcgcguuaaaagccaucguaaacguuauaggcaugacuaaaaugacgccgccuaucaaagaucuccugcc

SEQ ID NO: 528 - RNA, 613 nt, Psylliodes chrysocephala
gacaucuacagcuacagcaaccaagcaagaacuucuuuuagccagagauguguuagagauuggaguucaauggaguauagcugcaaaugauauaacggcuuuugaaagauauauggcucaacuaaaaugcuauuauuuugauuacaauaaccaacuuccagaaucugcauuuaaauaucaauuauuggguuuaaauuugcuguuuuuguugucccaaaauagaguagcugaauuucauacagaauuggaguuguugccaucugaucauauucagaaugauguuuauauaaggcauccauugucuauugagcaauauuuaauggagggaaguuauaauaaaauauuucuugcgaaaggcaauguaccugcagcuaacuacaacuuuuucauggacauauugcuggauaccauaagaguugaaauugcagauugcuugucaguggcuuaugaaaagauaucagugaaggauauugcuagaaugcuguaccugccuaaugaagaggcagcgaagaauuucgccaaaaaggcuuuccaaaauaaggcuuggaaauuaaacaaugaauuuuuccauuuuauuccugaagaaaaaacucaugaaccgauuccuuccaaa

SEQ ID NO: 529 - RNA, 313 nt, Psylliodes chrysocephala
gaagaagugucccuacauggcucaaaguaacucccgaggaaguuaaggaccacauuuucaaguuaggaaagaaagguuugaccccaucacaaauugguguaauccucagggauuccuaugguguagcccaaguaagauuuguuucuggaaacaaaauuuugcgaauuaugaaggccaugggauuagccccugaucuaccagaagauuuguacuaccuuaucaaaaaggcuguagcuauccgcaagcauuuggaaaggaauaggaaggacaaggacagcaaauuccguuuaauuuugguugaaucacguaucca

SEQ ID NO: 530 - RNA, 674 nt, Psylliodes chrysocephala
gguaguugacccuuucacaagaaaagauugguacgauguuaaggccccaucgauguuugccacccgacaaguuggcaaaacuuuaguuaaucguacccaagguaccaaaauugcaucugaagguuugaaauucagaguuuuugaaguaucuuuagccgauuuacaaaaugauaaugacgcggaaaggucuuucaggaaguuccgucuuauugcugaagacguucaagguaggaauguuuuaacaaauuuccaugguauggauuugacaacugacaaguugagguccaugguaaagaaauggcagacucuuauugaggcaucugcugauguuaaaacgucugaugguuauuugcuuaggguauucugcauugguuucaccaacaaagaucagcuuucacaaaggaaaacguguuaugcccagcauacacaagucagagcuauccgcaagaagauggucgaaauuaucacccgcgacauccaaggcucagacaucaaggaagucguuaacaaacuccuucccgacagcauagccaaggauauugagaaagccugccagggcaucuacccccugcacgauguguacauucgcaaagugaagguacugaagaagccccguuucgaacuuuccaaauuguuggaauugcacggagacggcgguaaagguggagcuggug

SEQ ID NO: 531 - RNA, 700 nt, Psylliodes chrysocephala
gaaaugcuacacuggaaagcaaaggauucgcuguaccgaaagcaauaaaaacugguacaaccauuguaggaauaacuuauaaagauggaguuauacuuggagcugauacucgcgcaacagaagauaccacuguugccgacaagaacugcgaaaaaauucacuaucuggcaccuaauauguauuguugcggagcuggaacugcugcagauacugaaaugacaacucagaugguagcagcacaauuggaguugcacaaacuuuauacaaauagggaaucuagaguugcaacugccaaucaacuuuuaaaacaguacuuauuuaguuaucaagguuauauaggagcugcuuuaauucuaggaggaguggauauagaaggcccccauuuguacaugauucauccucaugguucuaguguggaucuaccauacggaaccaugggaucuggaucauuggcugcuauagcaguauuugaauuggguuggaagccugauauggaggaagaagcaggaguucaacuuguaagagaugcuauagcugcugguauuuucaaugacuuaggaucugguucuaauguugauauuugcguuauucgcaaaggaucaguagauuacaagaggacauaugacgaggcaaauaaaaaaggugugaaacaaggaucauacaaauaucccagagguacuacugcaguuuuguccacuaa

SEQ ID NO: 532 - RNA, 387 nt, Psylliodes chrysocephala
agggaauugcauauccgaaaacuaugccuaaacauuuguguuggagaaucuggugacagacuuacucgugccgcuaagguauuggaacagcucacaggccaacaaccaguauucucaaaagccagauacacugucaggucuuuuggaauucguagaaaugaaaaaauagcuguacauugcacagucagaggugccaaggcugaagaaaucuuggaaagggguuuaaaaguuagagaauaugaauugagaagagauaacuucucagcaucugguaauuuuggauuugguauccaagaacacauugaucuugguaucaaauaugacccuaguauagguauuuauggucuugacuucuauguuguauugggacgaccuggauucaaugua

SEQ ID NO: 533 - RNA, 155 nt, Psylliodes chrysocephala
ggguguugguagacguuauuccaauauuguauugaaaaaggccgaugucaacuuagacaaacgugcuggagaauguucugaagaggaaguagaaaaaauuauuacaauuaugucuaacccucgucaauacaaaaucccugacugguucuugaaca

SEQ ID NO: 534 - RNA, 737 nt, Psylliodes chrysocephala
uucucuuuuuggugggucaagccguauugaagaugcaguggaauguuaccaaagggcugcaaaccuuuuuaaaauggcuaaaaguugggauucagcaggaaaagcuuuuugugaagcagcaaauuugcauucaagaaguggugcucgucacgaugcugcuacaaauuauguagaugcagcaaauuguuauaaaaaggcugacauuaaugagucuguaaacugcuuguuaaaagcaauagaaaucuacacagauauggguagauucacaauggcagcaaaacaucaucaaacaauugcugaaauguaugagacugacucugucgaccuagagagggcuguucaacacuaugaacaagcagcagacuacuuuagaggugaagaaagcaauucaucugcuaauaaaugccuucuaaaagucgcccaguaugcugcccaacuugaaaauuaugaaaaagcaauacagauauaccaagaaguggcuuauucagcauuggagagcucucuauugaaguacagugccaaagaguaucuguuuagggcugcccuuugucacuuauguguggauguucucaaugcccagcaugccauagaaaguuauauacaaagguacccagcuuuccaagauucaagagaauacaaguuauugaaaucacugauagaacacauugaagaacagaauguugaugguuacacagaugcugugaaggacuaugauucuauuucgcgucuggaucaau

SEQ ID NO: 535 - RNA, 208 nt, Psylliodes chrysocephala
gaggaaggaaaguuaugccauuuacauuuacaaaguuuugaaacaaguucaucccgacacuggaauuucgaguaaggcuaugagcauuaugaacaguuucguaaacgauaucuucgaacguauugcugcugaagcuucucgucuugcacauuacaauaaacggucuacaauaacuaguagagaaauccaaacugccguucgacuauua

SEQ ID NO: 536 - RNA, 337 nt, Psylliodes chrysocephala
caucaaagccaugguguucaacagcuuuuagcagcugaaaaacgcgcugcagacaaaguuacagaggcuagaaaacgcaaagcuaggaggcuaaagcaagcuaaagaagaggcucaagaugaaaucgaaaaauaccguaaggaaagggaacgccaauuucgcgaauucgaggcuaaacauaugggcucuaaagaggauguugccgcaaaaauugaaguagacacaaagcguaggauugaagaaaugaauaaggcuaucauaagucaaaaggaaccaguuauacuagaaauuuugaaacuggucuaugauaucaagccugaaauacacaagaacuacc

SEQ ID NO: 537 - RNA, 181 nt, Psylliodes chrysocephala
ccaguuggucguauucaucguuuauuaagaaagggaaauuaugcagaaagaguaggagcuggugcaccuguauauuuagcagccguaauggaauauuuggcugcugaaguucuagaauuggcugguaaugccgcuagagauaauaagaagacucguauuauccccaggcauuugcaauugg

SEQ ID NO: 538 - RNA, 660 nt, Psylliodes chrysocephala
ggaaacuagagcggaaguagaaaauauucauauuacacccagacagauuauuacuccccaagcuaauaaacccgucauggguauuguacaggacacauugacagcugucagaaaaaugaccaagagagaugucuucauugaaaaggagcagaugaugaacuuguugauguucuuaccuauuugggaugguaaaaugccucgcccugcaaucuuaaaaccaaagcccuuauggacuggaaaacaauuguucucucuuaucauuccgggaaacguaaauaugauaagaacacauucaacucauccugaugaagaagacgaugguccguacaaguggauaucuccaggagauacaaaaguaaugguagagcacggcgaauuaguuauggggaucuuaugcaaaaaaacacuaggaacaucugcagguucucuucuucacauuuguauguuggaauugggacacgaaguauguggaagauucuaugguaacauccaaacaguaaucaacaacugguuguuacuggaaggucacaguauugguauuggugacaccaucgccgauccucagacauauacugaaauucagagggcgaucaaaaaggccaaagaggauguaauagagguuauucaaaaagcucauaauauggaauuggaaccuacacc

SEQ ID NO: 539 - RNA, 355 nt, Psylliodes chrysocephala
gcuaaaucacguuuuugguauuucuugaggcaacuuaggaaguuuaagaaaacaacuggugaaaucguauccguuagacuaauaccugaaaagacuccaguuaagauaaagaauuucgguauaugguugagguaugacucccggucuggaacacacaacauguacagggaauacagagaccuuagcgucucuggagcuguaacagcuugcuauagggauaugggcgcccgccacagagcuagagcucaugcuauucaaaucaucaaaguggaacagguuaaagcaucugacaccaggaggccacaaguuaaacaauuccaugauucaaaaauucguuucccacuacccaaacgua

SEQ ID NO: 540 - RNA, 218 nt, Psylliodes chrysocephala
aaacaguauggacaugccuuaguugcugguauugauagguauccaaggaaaauccacaaacguauggguaaaggcaaaaugcacaagaggucuaagaucaagcccuucaucaagguauuaaacuacaaccaccugaugccuaccagauauucuguagacuuagcaucagauuuaaaaguaacuccaaaagaacuuaaagacccaaugaagaggaagaa

SEQ ID NO: 541 - RNA, 275 nt, Psylliodes chrysocephala
auggaaaacuaaagcgcaacuggcguaaaccaaaggguauugacaauagaguaaggaggagauucaagggacaauauuugaugccaaauauugguuauggaucggccgcuaaaacuagacacauguugccuacagguuuuaggaaaguguugguucauaaugugaaggaacuagaaguucuucucaugcaaaaucguaaguacugugcagaaauugcccaugggguuucauccaaaaaacguaaagacauuguugaacgugcucaacaauuaagc

SEQ ID NO: 542 - RNA, 285 nt, Psylliodes chrysocephala
auuugaaaaugccgaaacguugcuuauuuccgagguccauaugcuguuagagcauagaaaggaucaaaaugaaucugcagaagaugaacaagaauuuucggaugucuuuaugaaaaccuugacguauacugauagauuucgcaaauuuaaaaacaaggaaaccauaucggcuguuagaaauuuauuaaugcaaaccaaaaaauuacacaaauuugaauuggccgcuauugcgaauuugugcccagaaaccacugaagaggcaaaaucucuaauuccuucccugga

SEQ ID NO: 543 - RNA, 668 nt, Psylliodes chrysocephala
cagagucuacuuauggcacccauauucaugaaaaacgugaagaucgugaaucccguuucaccucauugguuaaugaaauuguaaauagaggugguagaugucuaauuccaguauuugcccuuggaagagcacaggaauuauugcucauauuagaugaauauuggagccugcauccagaacuucaugauauuccaauuuacuaugcuucuucuuuagcaaagaaauguauggccguguaccaaacauacauaaaugcaaugaaugauaaaauaaaaaggcaaauugcuguaaauaauccauuuguguucaaacauauuucuaauuuaaagggaaucgaucauuucgaagauauagggcccuguguggugauggcaucuccggguaugaugcaaagcggguuguccagagaacuuuucgaaacuugguguacggauguaaaaaauggcguuauaauagcggguuauuguguagaagguacuuuagcuaaaacgauauuaucagaaccugaagaaauuacaacaaugguuggacaaaaacugccucuaaagaugucagucgauuauauaucguuuucugcgcauacugacuaucagcagacgagcgaauuuauuaggcuauuaaaaccgccucauguagucuugguucacggcgaacaaaacgagaugaau

SEQ ID NO: 544 - RNA, 760 nt, Psylliodes chrysocephala
gcuuaguccagaggaacaaaaagaacggaaaauaaugaaacuguugcugaaaaucaagaacggcacuccuccuaugcguaaagcagcuuuaaggcagauuacagauaaggcgagagaauucggugccggaccguuauucaaccagauuuuaccgcuauugaugaguccuacccucgaggaucaagaacggcauuuguuggugaaaguaaucgauaggauucuguauaaauuggaugaucuggucaggccuuaugugcacaaaauucucguuguuauugaaccccugcuuaucgacgaagauuacuacgcucguguggaaggucgugagaucauauccaaccucgccaaagccgccggucuugccacuaugaucucuacgaugagaccugauauugacaacaucgacgaguacgucagaaauacaacugcgagagcuuucgccguuguagcuuccgcuuugggaauuccuucacuguugccuuucuuaaaggccguuuguaggucaaagaaaucuuggcaggccaggcauacugguauuaagaucguucagcagaucgcuauccuuauggguugugcaauuuugccacauuugaaaucuuugguggagauuauugagcauggauugguggaugagcaacaaaaagucaggaccauuaccgcuuuggguaucgccgcccuugcugaagcagcuaccccuuacgguauugaaaguuucgacuccguacugaaaccccucuggaaagguaucagaacucaucgc

SEQ ID NO: 545 - RNA, 244 nt, Phyllotreta nemorum
cuugcgaaagguaauguuccugcagcaagcuacaccuuuuuuauggauauacugcuugauacgauuagaguugaaauugccgauuguuuaucaguugccuaugaaaaaauaucugugaaagauuuuacuagaaugcucuauuugccgaaugaagaaacggcuaagaauuuugccaaaaaggcguuucaaaacaaggccuggaaauuagaccacgacuacuucuacuuuauucccgagcagaaga

SEQ ID NO: 546 - RNA, 266 nt, Phyllotreta nemorum
gagcacaucuucaaauugggcaagaaaggccucacgccgucccaaaucggugucauccugagggauuccuacggaguggcccaaguaagguucguguccggcaacaagauccuccgcaucaugaaggccaugggacuggcgcccgaccuacccgaggacuuguacuaccucaucaagaaggccguggccauucgcaagcacuuggagaggaacaggaaggacaaggacagcaaguuucgcuugauuuugguagagucucguaucca

SEQ ID NO: 547 - RNA, 612 nt, Phyllotreta nemorum
gaaggauugguacgaugucaaggcaccgucgauguucaccacgcgccaaguuggcaagaccuuggucaaccguacccaagguaccagaaucgcaucugaaggccugaaauucagagucuucgaaguuucauuagccgacuuacagaacgauaaugacgccgaaaggucuuucaggaaauuccguuugauugcugaagauguucaagguaggaacguauuaaccaauuuccaugguauggacuugaccacagauaaguugcgaucgauggucaagaaauggcagacucuuaucgaagcuucugcugaugugaaaacauccgauggguuuuugcuuaggguauuuuguauugguuucaccaacaaagaucagcauucccaaaggaaaacgugcuaugcccagcauacacaaguuagagcuauucgcaagaagaugguggaaaucaucacccgugacauccaggguuccgauaucaaggaaguagucaacaaacuguugcccgacagcauagcuaaggauaucgagaaggccugccaagguauuuacccgcuucacgacgucuacauucguaaggugaagguacucaagaagccgcguuucgaccuuuccaaauu

SEQ ID NO: 548 - RNA, 253 nt, Phyllotreta nemorum
cgaaaugaccacucaaaugguagcagcgcaacuggaacugcauaagcucuacacaaacagagaagcucgcguagcgacagccaaccagcuccugaagcaauauuuauucagcuaccaaggcuacauuggagccgcucucauucucgggggcguagacaucgaagggccccauuuacauaugauuuacccucacgguuccagcguggacuugccuuacgccaccauggguuccgguucuuuagccgcuauauca

SEQ ID NO: 549 - RNA, 355 nt, Phyllotreta nemorum
ucaacaaccaguuuucuccaaagccagauacaccgucaggucuuuuggaauucguagaaacgaaaaaauugcuguucacugcacaguaagaggcgcgaaggccgaggaaauauuagaaaggggcuuaaaagucagagaauacgaauugaggagggauaacuucucuaucucugguaacuucgguuucgguauccaagaacacauugaucuuggaaucaaguacgacccuagcauagguauuuacggucuugauuucuacguuguguuggggcgccccgguuuuaacguagcccaccgaagagcgaagaagggaaaaguugguuucucucauaggcuaaccaaggaagacgcuaug

SEQ ID NO: 550 - RNA, 209 nt, Phyllotreta nemorum
cgauggaaaaaggaaagugcaauucgcccucacugccauuaaggguguugguagacguuauuccaauauugucuugaaaaaggcagaugugaacuuggacaaaagggcuggagaauguuccgacgaagaaguugaaaaaaucauuacuauuaugucuaauccucgucaauacaaaauuccugacugguucuugaacagacaaaaggaua

SEQ ID NO: 551 - RNA, 467 nt, Phyllotreta nemorum
aaggggauuuuucggaucucucuucggaggguccaaucgcauugaagaugcaguggaauguuaccaaagggcugcgaauuuguuuaaaauggcgaaaaacugggaugcugcugguaaggccuuuugugaagcagcaaacuugcauucgagaagcggggcccgucaugauucugcuacuaauuucguagacgcagccaacugcuacaagaaagcugacgucagugaggcuguuaauugcuugcugaaagcuauagaaaucuauacagacaugggaaaauuuacgauggcagccaaguaccaucaaaacauugccgaaauguacgagacugauccaguugaccuagaacgagccguucagcacuacgaacaggccgcggacuacuuccgaggggaagagagcaauucguccgcaaacaaaugucuucugaaaguugcccaguacgcagcgcagcucgaaaacuacgaaa

SEQ ID NO: 552 - RNA, 245 nt, Phyllotreta nemorum
gguauuuccaguaaggcgaugaguauuaugaacaguuucgugaaugacaucuucgaaagaauugccgccgaagcuucucgucuggcucauuacaacaaacguucuacuauaacuaguagagaaauccaaacugcugugcgucugcuacuucccggugaacuugccaaacacgccguuagugaaggaacuaaggcuguuaccaaguacaccagcuccaaauaauucgccuacaacaaauacguugg

SEQ ID NO: 553 - RNA, 198 nt, Phyllotreta nemorum
aguuacagaggccagaaaacgcaaagccaggaggcugaagcaggccaaggaagaggcccaagaugagaucgagaaguaccguaaagaaagggaacgccaauuccgcgaauucgaagccaagcauaugggcucuaaagaggaugucgcuucgaagaucgagcaggacaccaagaggagaaucgaggauaugaacaaggc

SEQ ID NO: 554 - RNA, 181 nt, Phyllotreta nemorum
ccuguaggucguauucacagauuguugagaaaaggaaauuaugcugaaagaguuggugccggugcuccgguauacuuggcugcuguuauggaauauuuagccgccgaaguauuggaauuggccgguaaugcagcccgugacaacaagaaaacaagaauaauuccaagacauuugcaauugg

SEQ ID NO: 555 - RNA, 650 nt, Phyllotreta nemorum
aguguuucacaucggauucauaacgaaaaccauaaaaauccucagaugugugugcuucuucugcagcaaguugcuggucagcccuaacaauccuaaaaucaaagaaaucguaaugaagacgaaaggucaaccgagaaaacgacucacguucguguacgauuugugcaaggguaaaaacauuugcgaagguggggacgagauggauguggguaaagaaggcgaugaaaguaagaaggccggacacggaggaugcgguagauaucagccgaacaucaggagaaucggucuggauuuaacggccgaauggaagcaugucaacgaagacacgcaagagaagaaaaucgcucuaucggccgaaagaguuugggaaauacugaaacacaucacugacgaggagugcuucauucucgguauggaucccaaauuugccagaccugacuggaugauuguuacaguauugccuguaccuccuuuauccguacguccugcuguaguuauguacggaucagcuagaaaucaagaugacuugacucacaaauuagcagauaucauuaaaucuaacaaugagcugcagaagaaugaagcugcuggugcugcugcucacauuaucacugaaaauauuaaaauguuacaauuccauguagccacau

SEQ ID NO: 556 - RNA, 283 nt, Phyllotreta nemorum
cgcuuccuuuccguuaaaaaaaccguagccaugaaagcuaaaggagaguugaaagaauaugaaguuaucgggcgcaaauugcccaccgacaaagagaaaagccccccauuguauaaaaugaggauauucucucccgacccgaucguggcuaaaucgcgauucugguauuuucugagacagcuuaggaaauucaagaagaccaccggagaaaucguuucggucaagccgguacccgaaaaaaccccuaccaaaaucaagaacuuugguauuugguugagguacg

SEQ ID NO: 557 - RNA, 259 nt, Phyllotreta nemorum
aaagccgucgucauuaaaacauacgaugauggcacgucugacaaacaauacggacaugcuuuagucgcugguauugacagguaucccaggaaaauccacaagcguauggguaaaggcaaaaugcacaaaagguccaaaaucaagccuuucaucagaauuuuaaacuacaaucacuugaugcccaccagguauucgguagauuuagccuccgauuuaaaagugacuccuaaagaccucaaagauccgaugaagaggaaga

SEQ ID NO: 558 - RNA, 258 nt, Phyllotreta nemorum
aguucauaaggcaucaguccgacagguacucgaagcuaaagcgaaacuggcguaaacccaaggguauugacaacaggguaagaaggagauucaagggccaauauuuaaugccaaauauugguuauggaucagcaucuaaaacuaggcacaugcuaccuacagguuuuagaaaaguguugguacacaacgucaaggaacuagagguucuacucaugcaaaaucguaaauacugugcugaaauagcccaugguguuucau

SEQ ID NO: 559 - RNA, 284 nt, Phyllotreta nemorum
ccccaaagaauucgaaaacgccgaaacucugcucauauccgaaguucacaugcugcuagagcacaggaaagagcaaaacgaaucucuggaggacgaacaggaauuuucggauguguucaugaaaacucuaacuuacacggacagauuuagaaaauucaagaacaaagaaaccauaucggccgucaggaauuuauugaugcagacgaaaaaacuccacaaauucgagcuggccgccauagcgaacuuguguccggagaccaccgaggaggcgaagucucugauac

SEQ ID NO: 560 - RNA, 721 nt, Phyllotreta nemorum
uuuucugcucacaccgauuaccagcagaccagcgaauucauacggauucugaaaccuccucaccuuguguugguucacggggaacaaaacgaaaugaaccguuugaaagcggcccuucaaagggaauacgaagacgauagcaacacaaccauuaacauauacaacccgaggaacacgcauuccgucgaguuguacuucagaggcgagaaaacggccaagguaaugggacagcuagcagucgaugaaccgaaaacagggaaaacuuugaacggcauauugguuaaaaggaauuucaauuaucacguuuuaucuccugacgauuuacccaaauauaccgauuugaauauaagucaaauacugcaaagacagagucugcacuauuccggcaacagcggaguuuugagauacaugauaucccaaguagccggccuguuggaauccauagacggggagaagaaaaugcgagccuucaaugcaguagauauuauaaucgaaaauaaaauugucauuuuagaguggguggcgaaucccguaaacgauauguacgcagaugcgauaguagcggcgauuuuacaagcugauuuauuggaagcgcccauuaaaaacgugacgaccuccguuaaaauggacaggaugcacuucaaggagugccucaucgagauguugcaggacauguucggggaagauucggugccgaagauauucaagggggaaaaguugu

SEQ ID NO: 561 - RNA, 734 nt, Phyllotreta nemorum
uguuggugaaagucaucgauaggauuuuguacaagcuagacgauuuggucagaccguacgugcacaaaauucucgucguaaucgaaccguuguugaucgaugaggauuauuacgcgcgcguagaaggccgugaaaucauuucgaauuuagccaaggcagcuggauuagcaacuaugauuuccacgaugcguccggauaucgauaacauugaugaauacgugcguaauacgacagcuagagcuuucgcuguggucgcuucggcuuuggggauucccucguuguugccuuuucucaaagccguauguagaucgaagaaaucguggcaggccaggcacaccggcaucaaaaucguacaacaaaucgcuauacuaauggguugcgcgauuuugccucacuugaaaagcuugguggagauaauagaacacgggcuggucgaugagcaacaaaagguucguaccauuacggcucuggggauagccgcuuuggccgaagccgcuaccccguacggcauagaaagcuucgauuccguguugaaaccgcuuuggaaagguauaaggacucacagaggcaaaggacuggccgcuuuccucaaagcuaucgguuacuugauaccgcuuauggacucggaauacgccaauuauuacacgagagaagucauguugauuuugaucagggaauuucaaucgccagacgaggaaaugaagaagaucguuuugaaaguggugaaacaaugc

SEQ ID NO: 562 - RNA, 712 nt, Phyllotreta striolata
cgagaaacuccugucucaacugaagcucgaauugacuaauuugauguuucugccaacuucaacggccacagcuacaaagcaggaauuacuucuagcccgugaugucuuagaaaucgguguacaauggaguguagcagccaacgauauaaccgcguucgaaagauacauggcucaauugaaaugcuacuauuucgauuacaacaaccagcuuccugaaucugcauuuaaguaucaauuacugggauugaaucuucuguuuuuauugucgcuuaacagaguggcggaauuucauacggaguuagaacuucugccggcugaucauauacagaacgauguguacauaaggcaucccuuaucgauugagcaauacuuaauggaaggaaguuacaauaagaucuuccuugcaaaagguaacguucccgcagcgagcuacaccuuuuuuauggacauacugcuugauacgaucagaguugaaauugcggauuguuuaucaguagcguaugaaaagauaucuguaaaggauuuuacuagaaugcucuacuugccgaaugaagaagcugcuaaaaauuuugccaaaaaggcuuuucaaaacaaggcuuggaaauuagaccaugacuacuucuauuucauucccgaacagaaggcacacgaaccuauuccuucgaaggaauuggcccagcaagcaauugaauacgcuaaggaacuugaaaug

SEQ ID NO: 563 - RNA, 371 nt, Phyllotreta striolata
cuacagaagaagcgucccuacguggcucaagguaacccccgaagaagugaaagagcacaucuucaaauugggcaagaagggucucacgccgucccaaaucggugucauccugagggacuccuacgguguagcccaagucagguucguguccggcaacaagauccugcgcaucaugaaggccaugggacuggcgcccgaucuacccgaggacuuguacuaccucauuaagaaagcaguggccauccgcaagcacuuggagaggaacagaaaggacaaggacagcaaguuccguuugauuuugguagagucucguauccaccggcucgccagguacuacaagaccaaaucagucuuagccccuaacuggaaau

SEQ ID NO: 564 - RNA, 704 nt, Phyllotreta striolata
ggucauagauccuuucacgaggaaagauugguacgaugucaaggcaccgucgauguucaccacgcgccaagucggcaaaaccuuggucaaccguacccaagguacuagaaucgcaucugagggcuugaaauucagagucuucgaaguuucauuagccgacuuacagaacgacaaugaugccgaaaggucuuucaggaaguuccguuugauugcugaagauguucaagguagaaacguauuaaccaauuuccacgguauggauuugaccaccgacaagcugagaucgauggugaagaaauggcagacucucaucgaagcuucugcugacgugaagacuuccgauggguucuugcuuaggguauucuguauugguuucaccaacaaagaucagcauucccaaaggaaaacgugcuaugcccagcauacacaaguuagagcuauucgcaagaagaugguggaaaucaucacccgugacauccaggguuccgacaucaaggaaguagucaacaaacuguugcccgacagcauagcuaaggauaucgagaaggccugccaagguauuuacccgcuucacgaugucuacauucguaaggugaaggugcugaagaagccgcguuucgaccuuuccaaguuguuggaauugcacggugacggcggcaaaggaggcgccggugacaccaccggugaaggcgguucuaaaguag

SEQ ID NO: 565 - RNA, 722 nt, Phyllotreta striolata
ggauuuucauucgaaaacugcaaaagaaaugccuuacuggaaagcaagggauuuaccaccccuaaagcaaucaagacagguacuacaaucguagggauaguuuacaaagauggcgugauucuuggggcugauacuagagcuacagaagauacuacgguagccgauaaaaacugcgaaaaaauccacuuucuggcaccaaauauguauuguuguggugcaggaacugccgcagacaccgaaaugaccacucaaaugguagcagcccaacuggaauugcauaagcucuacacgaaccgagaagcucguguagcgacagccaaccagcuccugaagcaauauuuauucagcuaccaaggcuacauuggagcugcgcugauucuuggaggcguugacaucgaagggccccauuugcacaugauuuauccucacgguuccagcguggauuugccuuaugcuaccaugggauccgguucuuuagccgccauaucaguguuugaguuagguuggaaaccagagaugggagaagaagagggcauccagcugguuagaaacgcuauagcugcugguauauucaacgauuuaggaucugguuccaacguagauguguguaucauacguaaaggagugguggauuacagaaggaccuacgaugaagccaauaaaaagggcgugagacaaggaucuuacaaauuccccaggggcgcuacggcuguuuugucuac

SEQ ID NO: 566 - RNA, 477 nt, Phyllotreta striolata
auugcauauccgcaaauuaugccuuaacauuuguguaggagaaucuggugacagacuuacucgugcugcuaagguauuagaacaacugacuggccaacaaccagucuucucaaaagcccgauacaccgucaggucuuuuggaauucguagaaacgaaaagauugcuguacacugcacaguaagaggcgcgaaggccgaggaaauauuagaaaggggcuuaaaagucagagaauacgaauugaggagggauaacuucucuaucucugguaacuucgguuucgguauccaagaacacauugaucuuggaaucaaguacgacccgagcauagguaucuacggucuugauuucuacguuguguugggucgccccgguuucaacguagcccaccgaagagcgaagaaaggcaaaguugguuucucucauagguuaaccaaagaagacgcuaugaagugguuccaacagaaauacgacggaau

SEQ ID NO: 567 - RNA, 435 nt, Phyllotreta striolata
cggagaaauuucaacacauucuucguauccucgguacgaauaucgauggaaaaaggaaagugcaauucgcccucacugccaucaagggaguugguagacguuauuccaauauugucuugaaaaaggcagaugugaaccuagacaagagggcuggagaauguuccgacgaagaaguugagaaaauuauuacuauuaugucuaauccucgucaauacaaaaucccugacugguucuugaacagacagaaggacauuauugaugguaaauacagucagcugacuucuucaagucucgacucgaaguugcgugaggauuuggaaaggaugaagaagauucgugcccacagagguaugagacacuacuggggucuccgugugagaggucaacacacuaagacuacuggacgucguggacguacuguugguguguccaaga

SEQ ID NO: 568 - RNA, 731 nt, Phyllotreta striolata
agaugcaguggaauguuaccaaagggcugcaaaucuguuuaaaauggcgaaaaauugggaugcugcuggaaaggccuuuugcgaagcagcaaacuugcauucgagaaguggggcucgucaugacgcugcuacuaauuucguagacgcagccaacugcuauaagaaagcugacauuagugaggcuguuaauugcuugcugaaagcuauagaaaucuauacagacauggguaaauuuacgauggcggccaaguaccaucaaaacauugccgaaauguacgagacugaucccguugaccuagaacgagccguucagcacuacgaacaggcagcggacuacuuccgaggcgaagagagcaauucauccgcaaacaaaugucuucuaaaaguggcccaguacgcagcacagcucgaaaacuacgaaaaagcaauacaaaucuaccaagaaguagcuuuuucggcuuuagagaguucccuguuaaaauacagugcuaaggaguaccuguuuagggccgcucucugccauuuauguguggauauucucaaugcccagcaugcuguagaaaguuauauucaaagguauccugcauuucaagauucccgggaauauaaauuguugaaaacguugauggaacacauugaagagcagaauguugauggauauacagaugcugucaaugauuacgauucuauuucucguuuagauccuugguauacuacgaucuugcugcgua

SEQ ID NO: 569 - RNA, 291 nt, Phyllotreta striolata
caaagccgauaaaaagaagaaaaggaggaggaaggaaaguuacgcaaucuacauuuacaaaguuuuaaagcaaguacaucccgauaccgguauuuccaguaaggcgaugagcaucaugaacaguuucgugaaugacaucuucgaaaggauugcugcugaagcuucucgucuggcucauuauaacaaacguucuacuauuacuaguagagaaauccaaacugcugugcgucuacuccuucccggugaacuugccaaacacgcuguuagugaaggaacuaaggcuguuaccaa

SEQ ID NO: 570 - RNA, 255 nt, Phyllotreta striolata
ugguguucaacaacuacuggcagccgaaaagcgagcugcugauaaagucacagaggccagaaaacgcaaagcgaggagacuaaagcaggccaaggaagaggcccaagaugagaucgagaaguaccguaaagaaagggaacgccaauuccgcgaauucgaggccaagcauaugggcuccaaagaggauguagccucgaagaucgaacaggacaccaagaggagaaucgaggauaugaacaaggcuauccaaaguca

SEQ ID NO: 571 - RNA, 281 nt, Phyllotreta striolata
aguuaagggaaaggcaaagucacguuccaaucgugccggauuacaauuucccguuggucguauucacagauuauugaggaaaggaaauuacgccgaaagaguuggugccggugcuccgguauacuuagccgccguuauggaauauuuggcugcugaaguauuggaauuggccgguaaugcagcccgugauaacaagaaaacgagaauuauuccgagacauuuacaauuggcaauuagaaacgacgaggaauugaauaaauuacuuucuggaguuacgaucg

SEQ ID NO: 572 - RNA, 672 nt, Phyllotreta striolata
cgcucagaacaugacuuuuccagaaaucgucacgccuuucaauuuugacaagauguuagaguugguucaaaggggcaauucccaauauccaggagcgaaauauauuauuagagauaacggggaaaggauagauuugagauuucauccgaaaccuucggauuuacaucugcaauggggauauaaagucgaaaggcacaucagagacggcgauuugguaauauucaaucgacaaccgacucuccacaagaugaguaugaugggucacagagucaaaguauugccuugguccacguuucguaugaauuuaucguguacguccccuuacaacgcggauuucgauggcgacgaaaugaauuugcacguaccgcaaaguauggaaaccagagcggagguggaaaauauccacaucacgcccagacagauuaucacgccgcaagccaacaaacccgucaugggaauuguacaggacacauuaacggcugucaggaaaaugaccaaacgagacguguucauugaaaaggaacaaaugaugaauuugcuaauguuuuuaccuauuugggaugguaaaaugccccguccggcgauauuaaagcccaaaccucuguggacugguaaacaauuauuuucucuuauuaucccuggaaacguaaauaugaucagaacgcacucuac

SEQ ID NO: 573 - RNA, 439 nt, Phyllotreta striolata
aaugaggauauucucucccgacccgaucguggcuaaaucgcguuucugguauuuucugaggcaacuuaggaaauucaagaagaccaccggagaaaucguuucggucaagccgguacccgaaaaaaccccuaccaagauuaagaacuuugguauuugguugagguacgauucccguuccgguacacauaacauguacagggaauacagggaccucagcgugucuggagcuguaacggcuugcuauagggauaugggggcucgucaucgggcuagagcacaugcuauucagauuauuaaaguggaacaagucaagucgagcgacaccaggaggccacaagucaaacaauuccacgauucgaagauucgguucccguugcccaaacguauccaacacaagucuaugaaccgcuucucuguccgcaaacccagaacauacuuc

SEQ ID NO: 574 - RNA, 337 nt, Phyllotreta striolata
uaaagucguauugguccucggcggccgauacgccggaaagaaagcggucguuaucaaaaccugcgaugauggcacgucugacaaacaauacggacacgcuuuagucgcugguauugacagguaucccaggaaaauccacaagcguauggguaaaggcaaaaugcacaaaagguccaagauuaagccuuucaucaaaauuuuaaacuacaaucacuugaugccuaccagguacucaguagauuuagccucugacuuaaaaguaacagcuaaggaccugaaagauccgaugaagaggaagaaggcucguuuccagacccgugugaaauucgaagaaagg

SEQ ID NO: 575 - RNA, 384 nt, Phyllotreta striolata
gcuauacgaccaguuuaccgaccuaaaauugucaagaagaggacgaagaaguucauuaggcaucaguccgacagguacucgaagcuaaagcgcaacuggcguaaacccaaggguauugacaacaggguaaggaggagauucaagggccaauauuugaugccaaauauugguuauggaucagcaucuaaaacuaggcacaugcuaccuacagguuuuagaaaaguguugguacacaacguuaaggaacuagagguucuacucaugcaaaaucgcaaauacugcgcugaaauagcccacgguguuucaucgaaaaaacgcaaagauaucguugaacgugcucaacaauugagcaucagagucaccaauggacacgcuagauuacgu

SEQ ID NO: 576 - RNA, 279 nt, Phyllotreta striolata
auucgaaaaugcggaaacucuacuuauaucggaggugcacauguuguuggagcacaggaaagagcaaaacgaaucucuggaggacgagcaggaauuuucggauguguucaugaaaacucuaaccuacacggauagauuuaggaaauucaagaacaaagaaaccauaucggcugugagaaauuuauugaugcagacgaaaaaauugcacaaguucgaauuggccgccauagcgaauuugugcccggaaaccaccgaggaggcgaagucucugauaccguc

SEQ ID NO: 577 - RNA, 721 nt, Phyllotreta striolata
uuuucugcucacaccgauuaccagcaaacuagcgaauucauacgaauauugaaaccuccucauuuaguguuaguucauggggaacaaaacgaaaugagucguuugaaagcggcccuucaaagggaauacgaagacgacagcaacacuaccauuaacauauacaacccgagaaacacgcauuccgucgaauuguacuucagaggcgagaaaacggcgaaaguaaugggacaauuagccguagaugaaccgcaaaccggcaaaacuuugaacgguauauuggucaagaggaauuucaauuaucacguucuaucgcccgacgauuuaccgaaauauaccgauuugaauauaagccaaauauugcaaaggcagaguuugcauuauuccggcaacagcggaguuuugagauacaugauaucgcaaguggccgguuuauuggaaucgaucgacggggagaagaaaaugcgcgccuucaaugcaguagauauaauaauugaaaauaaaaucgucguuuuagaguggguggcgaauccagucaacgauauguacgcagaugcgauaguagcggcgauuuugcaagcggauuuguuggaacaacccauuaaaaacgugacgaccuccguuaaaauggacaggaugcauuucaaggagugccugaucgagaugcugcaggacauguuuggagaggauucggugccgaagauauucaagggggaaaaguugu

SEQ ID NO: 578 - RNA, 714 nt, Phyllotreta striolata
uguuggucaaagucaucgauaggauuuuguacaagcuggacgauuuggugaggccguacgugcacaaaauccucgucgucaucgaaccguugcugaucgacgaggauuauuacgcgcgcgucgaaggucgcgagaucaucucgaaucuagccaaagcggccggauuggcgacgaugaucuccacgaugcgucccgauaucgauaacaucgacgaguacgugcguaacaccacggcuagggcuuucgccgugguggcuucggcguugggaauccccucguuguugccguuccuuaaagccguguguagaucgaagaaaucguggcaagccaggcauacggguauuaagaucguucaacaaaucgccauacucauggguugcgcgauucugccgcaucugaaaagcuugguggaaaucaucgagcacggucuagucgaugaacaacaaaaaguccguacgauuacggcuuuggggauagcugcuuuagcggaagccgcuacgccguacgguaucgaaagcuucgauuccguguugaaaccgcucuggaaagguauaaggacucacagaggcaaaggccuggcagcuuuucucaaagccaucgguuaccugaucccucuuauggacuccgaauacgccaacuacuacacgagagaagugauguugauauugaucagggaauuccaaucgcccgacgaagagaugaagaagaucgugc

SEQ ID NO: 579 - RNA, 652 nt, Phyllotreta atra
uaaaugcgagaaacuccugucucagcugaagcuggaauuaaccaauuugauguuucugccaacuucaacagcgaccgcuacgaagcaggaauuacuucuugcacgcgaugucuuagaaauagggguacaauggaguguagcagccaacgauauaacagcauucgaaagauauauggcucaauugaaaugcuacuauuucgauuacaacaaccagcuucccgaaucugcguucaaguaucaauuacugggauugaaucuucuguuucuauuaucgcuuaacagaguggcugaauuucacacagaguuagaacuucuaccggcugaucacauacagaacgauguguacauaaggcauccuuuaucgauugagcaauauuuaauggaaggaaguuacaauaagauauuccuugcgaaagguaauguuccugcagccagcuacaccuuuuuuauggacauacugcuugauacgauucgaguugagauugccgauuguuuaucaguagcuuaugaaaaaauaucuguaaaggauuuuacaagaaugcucuauuugccgaaugaagaagcagccaagacuuuugccaaaaaggcuuuccaaaauaaggcuuggaaaauagaccaugacuacuucuauuucauucccgaacagaaaacu

SEQ ID NO: 580 - RNA, 288 nt, Phyllotreta atra
cucaaaguaacccccgaagaagugaaagagcacaucuucaaauugggcaagaaaggccucacgccgucccaaaucggugucauccuuagggauuccuacggaggggcccaaguaaguuucgucuccggcaacaauauccuccgcaucaugaaggccaugggccuggcgcccgaccuccccgaggacuuguacuaccucaucaagaaggcaguggccauccgcaagcacuuggagaggaacaggaaagacaaggacagcaaguuccgcuugaucuugguagagucucgu

SEQ ID NO: 581 - RNA, 606 nt, Phyllotreta atra
uucugaaggccugaaauucagagucuucgaaguuucguuagccgacuuacagaacgauaaugaugccgaaaggucuuucaggaaguuccguuugauugcugaagauguucaagguagaaacguauuaaccaauuuccaugguauggacuugaccacggauaagcugcgaucgaugguuaagaaauggcagacucuuauugaagcuucggcugaugugaaaacuuccgauggguuuuugcuuaggguauuuuguauugguuucaccaacaaagaucagcauucccaaaggaaaacgugcuaugcccagcauacacaaguuagagcuauucgcaagaagaugguggagaucaucacccgugacauccagggcuccgacaucaaagaaguagucaacaagcugcuucccgacagcauagcuaaggauaucgagaaggccugccaagguauuuacccgcuucacgaugucuacauucguaaggugaaggugcucaagaagccgcguuucgaccuuuccaaauuguuggaauugcacggcgacggcggcaaagggggcgccggugaagcuggcggcgaaggcgguucuaaaguagauaggccagagggaua

SEQ ID NO: 582 - RNA, 695 nt, Phyllotreta atra
cuuacuggaaagcaagggauuuaccacucccaaggcgauaaagacagguacuacaaucguagggauaguuuacaaagauggcgugauacuuggggcugauacucgagcuacagaagacaccacaguggccgauaaaaacugcgaaaaaauccacuuuuuggcuccaaauauguauuguuguggugcaggaacugccgcagacaccgaaaugaccacucaaaugguagcagcgcaacuggaauugcacaagcucuacacgaauagagaagcucgcguagccacagcuaaccagcuccugaagcaauauuuauucaguuaccaagguuacauuggagcugcgcugauccuuggaggcguagacaucgaagggccccauuuacacaugaucuauccucacgguucuagcguggauuugccuuacgcuacuaugggauccgguucauuagcugcuauaucgguguuugaguuagguuggaagccggagaugggagaagaagagggcauucagcucguuagaaacgcuauagcugcugguaucuuuaacgauuuaggaucugguuccaacguugauguauguaucauacggaagggaguaguagacuacagaaggacuuaugaugaagccaauaagaaaggcguaagacaaggaucuuauaaauuccccaggggugcuacggcuguuuuguccacuaaag

SEQ ID NO: 583 - RNA, 430 nt, Phyllotreta atra
ugccuuaacauuuguguaggagaaucuggugacagacuuacucgugcugcuaagguauuagaacaacugacuggucaacaaccaguuuucuccaaagccagauacaccgucaggucuuuuggaauucguagaaacgaaaaaauugcugugcacugcacaguaagaggcgcgaaggccgaggaaauauuagaaaggggcuuaaaagucagagaauacgaauugaggagggauaacuucucuaucucugguaacuucgguuucgguauccaagaacacauugaucuuggaaucaaguacgacccuagcauagguauuuacggucuugauuucuacguuguauugggucgccccggcuucaacguagcccaccgaagagcgaagaagggaaaaguugguuucucucauagguugaccaaagaagacgcuauga

SEQ ID NO: 584 - RNA, 323 nt, Phyllotreta atra
cgauggaaaaaggaaagugcaauucgcccucaccgccaucaagggugucgguaggcguuauuccaauauugucuugaaaaaggcagaugugaauuuagacaagagggccggagaauguucugacgaagaaguugaaaagaucauuaccauuaugucuaauccucgucaauacaaaaucccugacugguucuugaacagaccgaaggacauuauugaugguaaauacagucagcugacuucuucaagucuugacucgaaguugcgugaggauuuggaaaggcugaagaagauccgugcgcacagagguaugagacacuacuggg

SEQ ID NO: 585 - RNA, 811 nt, Phyllotreta atra
gggauucuucgguucucuuuucggaggguccagucgcaucgaggaugcaguggaauguuaccaaagggcugcgaauuuguuuaaaauggcgaaaaauugggaugcugcuggaaaagccuuuugugaagcagcaaacuugcauucgagaagcggggcucgucaugaugcugcaacuaauuuuguggacgcggccaacugcuauaagaaagcugacaucagugaggcuguuaauugcuugcugaaagcuauagaaaucuauacagacaugggaaaauuuacgauggcggccaaguaccaucaaaacauugccgaaauguacgagacugaucccguugaccuagaacgagccguucagcacuacgaacaggcugcggacuacuuccgaggagaagagagcaauucauccgcaaacaaaugucuucuaaaaguuggccaguacgcagcgcagcuggaaaacuacgaaaaagcaauacaaaucuaccaagaaguagcuuuuucagcuuuagagaguucccuguuaaaauacagugcuaaggaguaccuguucagggcugcucucugccauuuauguguggauauucucaaugcccagcaugcuguagaaaguuauauucaaagguauccugcauuucaagauucccgggaauauaaauuguugaaaacguugauggaacacauugaagagcagaauguugauggauauacagaugcugucaacgauuaugauucuaucucucguuuagauccuugguauacuacaaucuugcugcguauuaaaaagcaacuuaaugagagucccgauuugcguuaa

SEQ ID NO: 586 - RNA, 238 nt, Phyllotreta atra
aaagaacauuuccaaagccgauaaaaagaagaaaaggaggaggaaggaaaguuacgcaaucuacauuuacaaaguuuuaaagcaaguacaucccgacaccgguauuuccaguaaggcgaugaguauuaugaacaguuucgugaaugacaucuucgaaagaauugccgcugaagcuucucgucuggcucauuauaacaaacgaucuacuauuacuaguagagaaauccaaacugcugug

SEQ ID NO: 587 - RNA, 232 nt, Phyllotreta atra
agaggccagaaaacguaaagcgaggaggcugaagcaggccaaggaagaggcccaggacgagaucgaaaaguaccgcaaggaaagggagcgccaguuccgcgaguucgaggccaagcacaugggcuccaaggaggacgucgcugcgaagaucgaccaggacaccaagcgaagaaucgaggauaugaacaaggcuauccagagccagaaggaacccgugauucgaaacaucuug

SEQ ID NO: 588 - RNA, 295 nt, Phyllotreta atra
ggacuucaauucccggucggacgucuucaucgucuguugcgcaaaggucauuacgccgagcgcguuggcgccggugcacccgucuaccuggcugccguauuggaauaccucgccgcugaaguucucgaguuggcuggcaacgcugcccgugacaacaagaagacgcgaaucaauccgcgccacuugcagcuggcgguucguaacgacgaagagcucaauaagcugauggcuggcgugacaaucgcucaaggcgguguccucccuaacaucaacgccguucugcugccuaagaaga

SEQ ID NO: 589 - RNA, 744 nt, Phyllotreta atra
gacgccgacaaauguaaaaugggcauaccuauaccucaagcucacaguucggaucucaugacguccggcauguucuucggcucggcggcgacgccgagcagcaugagccccggcggugcuaugacuccuugggcuaaugccaauacgccuuauguaggcagugaguggucgccacaaaauaugauggguagugguaugacaccaggaggagcagcguuuucucccucugcggcaucagaugcuucuggaaugucaccagcuuacggagcuuggucuccgacgccucaaucuccugcuaugucuccuuauauggcgucuccucacggccaaucgccuucuuacaguccuucgaguccggcauucauacccaccucgccgucuaugacgcccacaucgccgggauauucuccaaguucuccagguuauucgccuaccaguccuaauuacaguccgacgagucccaguuacucuccgacaucuccgaguuauucaccgacgucgccuaguuacagcccgacgucuccuagcuauucgccuacuucuccgaguuacaguccuacaucuccuaguuacucaccgacgucgccgaguuauaguccaacgucuccgaguuacucgccuacuucuccuaguuacaguccuacgucuccgaguuacucgccgacgucgccgaguuauaguccaacaucuccgaauuauucgccuacaucuccgaauuauucgccuacaucuccgagcuauucg

SEQ ID NO: 590 - RNA, 348 nt, Phyllotreta atra
ccacagaaaaggagccuaaaacuccuuuauauaaaaugaggaucuucgcucccgaucaaauuguggccaagucucguuucugguauuucuugagacagcuaaagaaguucaagaaagcuaccggugagaucgucucggucaaacccauuccagaaaaaacucccaccaaaaucaagaacuuugguauuugggugagguacgacucucguucaggaacucacaacauguacagagaauauagagauuugaguguuuccggugcuguaacucaaugcuacagagauaugggagcuagacaucgugcuagagcucauucaauucagauuauuaaaguggagcaagucaagg

SEQ ID NO: 591 - RNA, 260 nt, Phyllotreta atra
cguagugauuaaaaccugcgacgauggcacgucugacaaacaauacggacacgcucuagucgcuggcaucgacagguaucccaggaaaauccacaagcguaugggcaaaggcaaaaugcacaaaagguccaagauuaagccuuucaucaaaguuuuaaacuacaaucacuugaugcccacuagguauucgguagauuuagcauccgauuuaaaaguaaccgcuaaggauuugaaagacccgaugaagaggaagaaggcuc

SEQ ID NO: 592 - RNA, 263 nt, Phyllotreta atra
aguucauaaggcaucaguccgacagguacucgaagcuaaagcguaacuggcguaaacccaaggguauugacaacaggguaagaaggagauucaagggccaauauuuaaugccaaauauugguuauggaucagcaucuaaaacuaggcacaugcuaccuacagguuuuagaaaaguguuggugcacaacguuaaggaacuagagguucuacucaugcaaaaucguaaauacugugcugaaauagcucacggugugucaucuaaa

SEQ ID NO: 593 - RNA, 291 nt, Phyllotreta atra
uuccccaaagaguucgaaaacgccgaaacucuacuuauaucugaaguucacaugcugcuggagcauaggaaagagcaaaacgaaucucuggaggaugaacaagaauuuucggauguguucaugaaaacucucacuuacacggacagauuuagaaaauucaagaacaaagaaaccauaucggcugugaggaauuuauugaugcaaacgaaaaagcugcacaaguucgaacuggccgccaucgcgaaucugugcccggaaaccaccgaggaggccaagucucugauaccaucg

SEQ ID NO: 594 - RNA, 694 nt, Phyllotreta atra
ggucaagaaguaggacgaucaugcauuaugauugaauuuaaagggaaaaaaaucauguuggauugugggauacauccaggccuauccgguauggaugcucuaccauucguugacuuaauugaagccgaugaaaucgauauacuacuuauaucccauuuucaucucgaucacagcggagcauugccuugguuucuguuaaaaaccagcuucaaaggccguuguuucaugacccaugcuacaaaggcuauauacagguggcuguugucugacuacauuaaagucaguaauauugccacggaacaaaugcuauacacagaagccgauuuggaagccagcauggauaaaaucgaaacgauaaauuuccacgaagaaaaagauguacuggguguuaaauuuugggcuuacaacgccggacacguucuaggagcugcuauguucaugaucgaaauagcugguguuaaaauauuguauacuggagauuuuucucgacaagaagacaggcauuuaauggcugcggaaauacccacgauacauccggacgugcuaauaacggaaucuacuuaugguacacauauucacgagaaaagggaggaucgcgagacucguuucacuacauuaguaaacgauaucguaaauagagguggaaggugucuuauaccaguauuugccuuaggaagagcacaagaauuguugc

SEQ ID NO: 595 - RNA, 724 nt, Phyllotreta atra
uagacacaccggcauaaaaauagugcaacaaaucgccauacucauggguugcgcgauucugccucacuugaaaagcuugguggaaauuauagagcacgguuuggucgaugaacagcaaaaaguucguacgaucacggcuuuaggaauagcugcucuggccgaagccgcuacgccguacgguauagaaagcuucgauuccguauugaaaccccuguggaaggguauaagaacucacagggguaaaggacuggccgcuuuccucaaagccaucgguuaccugauaccucucauggauucggaauacgccaauuacuacacgagagaagugauguugauuuugaucagggaauuccaaucgcccgacgaggaaaugaagaaaaucgugcucaaaguggugaaacaguguuguucgaccgacggcguggaaucgcaauauauaaaggaggagauccugccgcaguuuuucaagcauuucuggaaccacaggauggccuuggacagaaggaacuacaggcaacugguggauaccacgguggagauugcgaauaaaguuggagcuucggagauuaucaacagaauaguggacgauuugaaagaugaaaacgaagcguacaggaagauggugauggagaguauagagaagaucauggggaauuugggagcggccgauguggauucgagauuggaggagcagcugaucgaugggauuuuguacgcuuuccag

SEQ ID NO: 596 - RNA, 658 nt, Phyllotreta cruciferae
ucucaacugaagcucgaauuaaccaauuugauguuucugccaacuucaacagcgaccgcuacgaagcaggaauuacuucuugcucgcgaugucuuagaaauagggguacaauggaguguagcagccaacgauauaacugcauucgaaagauauauggcucaauugaaaugcuacuauuucgauuacaacaaccagcuucccgaaucugcuuuuaaguaucaauuacugggauugaaucuucuguuuuuauuaucgcuuaacagaguggcugaauuucauacagaguuagaacuucuaccggcugaucacauacagaacgacguguacauaaggcauccuuuaucgauugagcaauauuuaauggaaggaaguuacaauaagauauuccuugcgaaagguaauguuccugcagccagcuacaccuuuuuuauggacauacugcuugauacgauucgaguugaaauugcggauuguuuaucaguagccuaugaaaaaauaucuguaaaggauuuuacaagaaugcucuauuugccgaaugaagaagcagccaagacuuuugccaaaaaggcuuuccaaaauaaggcuuggaaauuagaccaugacuacuucuauuucauucccgaacagaaaacucaugaaccuauuccuucgaaagagc

SEQ ID NO: 597 - RNA, 311 nt, Phyllotreta cruciferae
agaagugaaagagcacaucuucaaauugggcaagaaaggccucacgccgucccaaaucggugucauccuuagggauuccuacggaguggcccaagugagguucgucuccggcaacaagauccuccgcaucaugaaggccaugggacuggcgcccgaccuacccgaggacuuguacuaccucaucaagaaggcaguggccauccgcaagcacuuggagaggaacaggaaggacaaggacagcaaguuccgcuugaucuugguggagucucguauccaccggcucgccagguacuacaagaccaagacagucc

SEQ ID NO: 598 - RNA, 650 nt, Phyllotreta cruciferae
gaagguaauugauccuuucacgaggaaagacugguacgaugucaaggccccaucgauguucaccacucgccagguuggcaaaaccuuggucaaccguacccaagguacuagaaucgcuucugaaggccugaaauucagagucuucgaaguuucguuagccgacuuacagaacgauaaugaugccgaaaggucuuucaggaaguuccguuugauugcugaagauguucaagguagaaacguauuaaccaauuuccaugguauggacuugaccacggauaagcugcgaucaaugguuaagaaauggcagacucuuauugaagcuucagcugaugugaaaacuuccgauggguuuuugcuuaggguauucuguauugguuucaccaacaaagaucagcauucccaaaggaaaacgugcuaugcccagcauacacaaguuagagcuauucgcaagaagaugguggagaucaucacccgugacauccagggcuccgacaucaaagaaguagucaacaaacugcuucccgacagcauagcuaaggauaucgagaaggccugccaagguauuuacccgcuucacgaugucuacauucguaaggugaaggugcucaagaagccgcguuucgaccuuuccaaauuguuggaauugcacg

SEQ ID NO: 599 - RNA, 672 nt, Phyllotreta cruciferae
cuuacuggaaagcaagggauuuaccacucccaaggccauaaagacagguacuacaaucguagggauaguuuacaaagauggugugauacuuggugcugauacucgagcuacagaagauaccacaguggccgauaaaaacugcgaaaaaauccacuuuuuggcaccaaacauguauuguuguggugcaggaacugccgcagacaccgaaaugaccacucaaaugguagcagcgcaacucgaauugcacaagcucuacacgaauagagaagcucgcguagcaacagcuaaccagcuccugaagcaauauuuauucaguuaccaagguuacauuggagcugcgcugauccuuggaggcguagacaucgaagggccccauuuacacaugaucuauccucacgguucuaguguggauuugccuuacgcuacaaugggauccgguucauuagcugcuauaucaguguuugaauuagguuggaagccggagaugggagaagaagagggcauucagcucguuagaaacgcuauagcugcugguaucuuuaacgauuuaggaucugguuccaacguugauguauguaucauacggaaaggaguaguagauuacagaaggacuuacgaugaagcuaacaagaaaggcguaagacaaggaucuuauaaauuucccaggggugc

SEQ ID NO: 600 - RNA, 388 nt, Phyllotreta cruciferae
cgugcugcuaagguauuagaacaacugacuggccaacaaccaguuuucucaaaagccagauacaccgucaggucuuuuggaauucguagaaacgaaaaaauugcugugcacugcacaguaagaggcgcgaaggccgaggaaauauuagaaaggggcuuaaaagucagagaauacgaauugaggagggauaacuucucuaucucugguaacuucgguuucgguauccaagaacacauugaucuuggaaucaaguacgacccuagcauagguauuuacggucuugauuucuacguuguauugggucgcccuggcuucaacguagcccaccgaagagcgaagaaaggaaaaguugguuucucucauagguuaaccaaagaagacgcuauga

SEQ ID NO: 601 - RNA, 310 nt, Phyllotreta cruciferae
agucauguuugcauugacugccaucaagggugugggaagacguuaugccaauauuguauugaaaaaagcugauaucgaucuugauaaacgugcuggagaaugcuccgaagaagaagucgaaaaaauugucacaauuaugacaaauccaagacaauacaaaauuccugacugguuccucaacagacagaaggauaucguugacggaaaauauucacagcucacuaguuccaauuuggauucgaaacuucgugaggauuuggagcgcaugaagaagauucgcgcccacagaggucuucgucauuauuggggu

SEQ ID NO: 602 - RNA, 682 nt, Phyllotreta cruciferae
ggggauuuuucggaucucuuuucggaggguccagucgcauugaggaugcaguggaauguuaccaaagggcugcaaauuuguuuaaaauggcgaaaaauugggaugcugcuggaaaagccuuuugugaagcagcaaacuuacauucgagaaguggggcucgucaugaugcugcaacuaauuuuguggacgcggccaacugcuauaagaaagcugacaucagugaggcuguuaauugcuugcugaaagcuauagaaaucuauacagacauggggaaauuuacgauggcggccaaguaccaucaaaacauugccgaaauguacgagacugauccuguugaccuagaacgagccguucagcacuacgaacaggcugcggacuacuuccgaggagaagagagcaauucaucugcaaacaaaugucuucuaaaaguugcccaguacgcagcacagcucgaaaacuacgaaaaagcaauacaaaucuaccaagaaguagcuuuuucagcuuuagagaguucccuguuaaaauacagugcuaaggaguaccuauuuagggcugcucucugccauuuauguguggauauucucaaugcccagcaugcuguagaaaguuauauucaaagguauccugcauuucaagauucccgggaauauaaauuguugaaaaccuugauggaacacauuga

SEQ ID NO: 603 - RNA, 239 nt, Phyllotreta cruciferae
aaagaacauuuccaaagcugauaaaaagaagaaaaggaggaggaaggaaaguuacgcaaucuacauuuacaaaguuuuaaagcaaguacaucccgacaccgguauuuccaguaaggcgaugaguauuaugaacaguuucguaaaugacaucuucgaaagaauugccgcugaagcuucucgucuggcucauuauaacaaacgaucuacuauuacuaguagagaaauucaaacugcugugc

SEQ ID NO: 604 - RNA, 207 nt, Phyllotreta cruciferae
ugcugacaaaguuacagaggccagaaaacguaaagcgaggaggcuaaagcaggccaaggaagaggcccaagaugagaucgaaaaguaccguaaagaaagggagcgccaguuccgcgaguucgaggccaagcauaugggcuccaaggaggaugucgcuucgaagaucgaccaggacaccaagagaagaaucgaggauaugaacaaggc

SEQ ID NO: 605 - RNA, 239 nt, Phyllotreta cruciferae
caauuuccgguaggucguauucacagauuauugaggaaaggaaauuacgcugaacgaguuggagccggugcuccgguauacuuagcugccguuauggaauauuuggcugcugaaguauuggaauuggccgguaaugcagcucgugacaacaagaaaacaagaauaauuccgagacauuugcaauuggcuauuaggaaugacgaggaauugaauaaauuacuuucugguguaacaaucgc

SEQ ID NO: 606 - RNA, 662 nt, Phyllotreta cruciferae
auuaugaacagcgacgaugagaaauucggagaagacgaagacguggacaaaauggacgaugacauguuccucagaugcaucgaggcuaauaugcugagugacaugacacuccaaggcauagaagccauuucaaaagucuacaugcauuuaccacaaacagacucgaagaaacgcauaguaauuacggauacuggcgaauucaaggcuauugcugaaugguugcucgaaacagacgguaccaguaugaugaaaguacugucggaaagagauguagaccccguuagaacguuuucgaacgauauuugcgaaauauuuucgguguugggaauagaagcuguucgaaaaucggucgaaaaagaaaugaacgccguacuucaauucuacggucuguacguaaacuacagacaucucgcucugcuuugugauguuaugacggccaaaggacauuuaauggccauuacucgucacgguauaaacagacaagauacgggagcgcugaugagaugcucuuucgaggaaaccgucgacguacugauggacgcuuccagucacgccgaagucgauccgaugagagguguaucggagaacaucauucucggccaauugccgaggaugggaacuggcuguuucgacuuguuguuggacgccgacaaauguaaaau

SEQ ID NO: 607 - RNA, 385 nt, Phyllotreta cruciferae
accgauaaagagaaaagccccccauuguauaaaaugaggauauucucucccgacccgaucguggcuaaaucgcguuucugguauuuucugagacaacuuaggaaauucaagaagaccaccggagaaaucguuucggucaagcugguacccgaaaaaaccccuacuaagauuaagaacuuugguauaugguugagguacgauucccguuccgguacgcauaacauguacagggaauacagagaccuuagcguuucuggagcuguaacggcuugcuauagagacaugggagcucgucaucgggcuagagcacaugcuauucagauuauuaaaguggaacaaguuaagucgagcgacaccaggaggccacaagugaaacaauuccacg

SEQ ID NO: 608 - RNA, 258 nt, Phyllotreta cruciferae
caagaaggccguagucauuaaaaccugcgacgauggcacgucugacaaacaauacggacacgcucuagucgcugguauagacagguaucccaggaaaauccacaagcguaugggcaaaggcaaaaugcacaaaagguccaagauuaagccuuucaucaaaguuuuaaacuacaaucacuugaugcccacuagguacucgguagauuuagcguccgauuuaaaaguaacggcuaaggauuugaaagacccgaugaagag

SEQ ID NO: 609 - RNA, 264 nt, Phyllotreta cruciferae
cgcuaugauaaacucaagcgaaacuggcguaaaccgaaagguauugauaacagaguucguaggcgcuucaagggucaauauuugaugcccaacauugguuacggaaguaacaaaaaaacucgucacaugcuucccacuggauuccgaaagguucucguccacaaugucaaggaacuugaaguucuuaugaugcaaaaucguaaauuuugugcagaaauugcacaugcaguuagcaguaaaaaacgaaaagaaaucguugaacgc

SEQ ID NO: 610 - RNA, 272 nt, Phyllotreta cruciferae
acgccgagacucuacuuauauccgaagugcacaugcugcuggagcacaggaaagagcaaaacgaaucucuggaggaugagcaagaauuuucggauguguucaugaaaacucugacuuacacagacagauuuagaaaauucaagaacaaagaaaccauaucggcugugagaaauuuauugaugcaaacgaagaagcugcacaaguucgaacuggccgccaucgccaaccugugcccggaaaccaccgaggaggccaagucucugauaccgucg

SEQ ID NO: 611 - RNA, 760 nt, Phyllotreta cruciferae
ucgaaauagcuggugucaaaauauuguauacuggagauuuuucucgacaagaagacaggcauuuaauggcugcggaaauacccacgauacauccggacguguuaauaacggaaucuacuuaugguacgcauauucacgagaaaagggaggaucgugagacucguuucacuacacuaguaaacgauaucguaaauagagguggaaggugucucauaccaguauuugcguuaggaagagcacaggaauuguugcuuauuuuagaugaauauuggagucaacaucccgaacuccacgacaucccgaucuacuacgcuucaucguuagcgaagaaaugcauggccguguaucagacuuacauaaacgccaugaaugacaaaaucaagcgacaaauagcgauuaauaacccguuuguauucaaacauauaucuaauuuaaaggguaucgaucauuuugaugauauuggaccgugcguggugauggcaucacccgguaugaugcaaagcggcuuguccagagaacuguucgaaacuugguguacugaugcgaaaaauggaguuaucauagcagguuacugcgucgaaggaacuuuagcuaaaacaauauuauccgaaccagaagaaaucaccacaaugguggggcaaaagcuacccuuaaaaaugucuguugauuacauaucauuuucugcucacacugauuaccagcagaccagcgaguuuauacgaauguugaaaccuccucaccuaguguuaguucauggcga

SEQ ID NO: 612 - RNA, 766 nt, Phyllotreta cruciferae
cgguuacuugauaccgcuuauggauucugaauacgccaauuacuauacgagagaagugauguugauuuugaucagggaauuccaaucgcccgaugaggaaaugaagaaaaucgugcucaaaguugugaaacaguguuguucgaccgacgguguggaaucgcaauauaucaaggaggagauccugccgcaauuuuucaagcauuucuggaaccacaggauggcauuggauagaagaaauuacaggcaauugguggacacuacgguggagauugccaacaaagugggagcuucggagauuauaaaucgaauaguggacgauuugaaagaugaaaacgaggcguacaggaaaauggugauggagaguauagagaagaucauggggaaucugggagcggccgauguggauucgagauuggaggagcaguuaaucgauggaauuuuguacgcuuuccaggagcagacgacugaggauguggugauguugaaugguuucgguacgaucguaaaccaacugggcaaacgcgucaaaccguauuuaccgcaaauuugcgguacgauccuguggcguuugaacaacaaauccgccaaagugcgccaacaggcggccgauuugauuucccgcauagccgucgugaugaagaccugccaggaggagaaacugaugggccauuugggcgucgugcucuacgaguaccucggcgaggaguacccggaaguguuggguuccauuuugggcgcuuuaaaagccaucguaaacgucauaggu

SEQ ID NO: 613 - protein, 267 aa, Phyllotreta armoraciae
MSKVNEVADLYKQLKSEWNTKNPNLSKCEKLLSQLKLELTNLMFLPTSTATATKQELLLARDVLEIGVQWSVAANDITAFERYMAQLKCYYFDYNNQLPESAFKYQLLGLNLLFLLSLNRVAEFHTELELLPADHIQNDVYIRHPLSIEQYLMEGSYNKIFLAKGNVPAASYTFFMDILLDTIRVEIADCLSVAYEKISVKDFTRMLYLPNEETAKNFAKKAFQHKAWKLDHDYFYFIPEQKTHEPIPSKELAQQAIEYAKELEMIV

SEQ ID NO: 614 - protein, 151 aa, Phyllotreta armoraciae
MGRMHAPGKGIAQSALPYRRSVPTWLKVTPEEVKEHIFKLGKKGLTPSQIGVILRDSYGVAQVRFVSGNKILRIMKAMGLAPDLPEDLYYLIKKAVAIRKHLERNRKDKDSKFRLILVESRIHRLARYYKTKSVLAPNWKYESSTASALVA

SEQ ID NO: 615 - protein, 256 aa, Phyllotreta armoraciae
RKKGVKKKVIDPFTRKDWYDVKAPSMFTTRQVGKTLVNRTQGTRIASEGLKFRVFEVSLADLQNDNDAERSFRKFRLIAEDVQGRNVLTNFHGMDLTTDKLRSMVKKWQTLIEASADVKTSDGFLLRVFCIGFTNKDQHSQRKTCYAQHTQVRAIRKKMVEIITRDIQGSDIKEVVNKLLPDSIAKDIEKACQGIYPLHDVYIRKVKVLKKPRFDLSKLLELHGDGGKGGAGDSTGEGGSKVDRPEGYEPPVQESV

SEQ ID NO: 616 - protein, 276 aa, Phyllotreta armoraciae
MSSVLCPEIPEPGFSFENCKRNALLESKGFSTPKAIKTGTTIVGIVYKDGVILGADTRATEDTTVADKNCEKIHFLAPNMYCCGAGTAADTEMTTQMVAAQLELHKLYTNREARVATANQLLKQYLFSYQGYIGAALILGGVDIEGPHLHMIYPHGSSVDLPYATMGSGSLAAISVFELGWKPEMGEEEGIQLVRNAIAAGIFNDLGSGSNVDVCIIRKGVVDYRRTYDEANKKGVRQGSYKFPRGATAVLSTKVVDVEEVSVIPIEAERMDVAAF

SEQ ID NO: 617 - protein, 191 aa, Phyllotreta armoraciae
MAPVAKPKETKDKRDVKDKTKNHMRELHIRKLCLNICVGESGDRLTRAAKVLEQLTGQQPVFSKARYTVRSFGIRRNEKIAVHCTVRGAKAEEILERGLKVREYELRRDNFSISGNFGFGIQEHIDLGIKYDPSIGIYGLDFYVVLGRPGFNVAHRRAKKGKVGFSHRLTKEDAMKWFQQKYDGIILASKK

SEQ ID NO: 618 - protein, 154 aa, Phyllotreta armoraciae
MSLVIPEKFQHILRILGTNIDGKRKVQFALTAIKGVGRRYSNIVLKKADVNLDKRAGECSDEEVEKIITIMSNPRQYKIPDWFLNRQKDIIDGKYSQLTSSSLDSKLREDLERMKKIRAHRGMRHYWGLRVRGQHTKTTGRRGRTVGVSKKKIR

SEQ ID NO: 619 - protein, 289 aa, Phyllotreta armoraciae
SNAQKAQQLIAEAEKKVSSRGFFGSLFGGSSRIEDAVECYQRAANLFKMAKNWDAAGKAFCEAANLHSRSGARHDAATNFVDAANCYKKADISEAVNCLLKAIEIYTDMGKFTMAAKYHQNIAEMYETDPVDLERAVQHYEQAADYFRGEESNSSANKCLLKVAQYAAQLENYEKAIQIYQEVAFSALESSLLKYSAKEYLFRAALCHLCVDILNAQHAVESYIQRYPAFQDSREYKLLKTLMEHIEEQNVDGYTDAVNDYDSISRLDPWYTTILLRIKKQLNESPDLR

SEQ ID NO: 620 - protein, 123 aa, Phyllotreta armoraciae
MPPKTSGKAAKKAGKAQKNISKADKKKKRRRKESYAIYIYKVLKQVHPDTGISSKAMSIMNSFVNDIFERIAAEASRLAHYNKRSTITSREIQTAVRLLLPGELAKHAVSEGTKAVTKYTSSK

SEQ ID NO: 621 - protein, 117 aa, Phyllotreta armoraciae
MASHQSQGVQQLLAAEKRAADKVTEARKRKARRLKQAKEEAQDEIEKYRKERERQFREFEAKHMGSKEDVASKIDQDTKRRIEDMNKAIQSQKEPVIQNILELVYDIKPEIHKNYRN

SEQ ID NO: 622 - protein, 124 aa, Phyllotreta armoraciae
MSGRGKGGKVKGKAKSRSNRAGLQFPVGRIHRLLRKGNYAERVGAGAPVYLAAVMEYLAAEVLELAGNAARDNKKTRIIPRHLQLAIRNDEELNKLLSGVTIAQGGVLPNIQAVLLPKKTEKKA

SEQ ID NO: 623 - protein, 1897 aa, Phyllotreta armoraciae
MAATDSKAPLRTVKRVQFGILSPDEIRRMSVTEGGIRFPETMEAGRPKICGLMDPRQGVIDRSSRCQTCAGNMTECPGHFGHVDLAKPVFHIGFITKTIKILRCVCFFCSKLLVSPNNPKIKEIVMKTKGQPRKRLTFVYDLCKGKNICEGGDEMDVGKEGDESKKAGHGGCGRYQPNIRRIGLDLTAEWKHVNEDTQEKKIALSAERVWEILKHITDEECFILGMDPKFARPDWMIVTVLPVPPLSVRPAVVMYGSARNQDDLTHKLADIIKSNNELQKNEAAGAAAHIITENIKMLQFHVATLVDNDMPGMPRAMQKSGKPLKAIKARLKGKEGRIRGNLMGKRVDFSARTVITPDPNLRIDQVGIPRSIAQNMTFPEIVTPFNFDKMLELVQRGNSQYPGAKYIIRDNGERIDLRFHPKPSDLHLQWGYKVERHIRDGDLVIFNRQPTLHKMSMMGHRVKVLPWSTFRMNLSCTSPYNADFDGDEMNLHVPQSMETRAEVENIHITPRQIITPQANKPVMGIVQDTLTAVRKMTKRDVFIEKEQMMNLLMFLPIWDGKMPRPAILKPKPLWTGKQLFSLIIPGNVNMIRTHSTHPDEEDDGPYKWISPGDTKVMVEHGELVMGILCKKTLGTSAGSLLHICILELGHEVCGRFYGNIQTVINNWLLLEGHSIGIGDAIADPQTYTEIRRAIKKAKEDVIEVIQKAHNMELEPTPGNTLRQTFENQVNRILNDARDKTGGSAKKSLTDYNNLKAMVVSGSKGSNINISQVIACVGQQNVEGKRIPFGFRKRTLPHFIKDDYGPESRGFVENSYLAGLTPSEFYFHAMGGREGLIDTAVKTAETGYIQRRLIKAMESVMVHYDGTVRNSVGQLIQLRYGEDGLCGEMVEFQTLSTVKLSNKAFERKFRFDPSNERYLRRVFNEEVIKQLMGSGEVISELEREWDQLQKDREALRQIFPSGESKVVLPCNLQRMIWNVQKIFHINKRAPTDLSPLRVIQGVRELLKKCIIVAGEDRLSKQANENATLLFQCLVRSTLCTKCVSEEFRLSTEAFEWLIGEIETRFQQAQVNPGEMVGALAAQSLGEPATQMTLNTFHFAGVSSKNVTLGVPRLKEIINISKKPKAPSLTVFLTGAAARDAEKAKNVLCRLEHTTLRKVTANTAIYYDPDPQNTVIPEDQEFVNVYYEMPDFDPTRISPWLLRIELDRKRMTDKKLTMEQIAEKINAGFGDDLNCIFNDDNAEKLVLRIRIMNSDDEKFGDGADEDVDKMDDDMFLRCIEANMLSDMTLQGIEAISKVYMHLPQTDSKKRIVITDTGEFKAIAEWLLETDGTSMMKVLSERDVDPVRTFSNDICEIFSVLGIEAVRKSVEKEMNAVLQFYGLYVNYRHLALLCDVMTAKGHLMAITRHGINRQDTGALMRCSFEETVDVLMDASSHAEVDPMRGVSENIILGQLPRMGTGCFDLLLDADKCKMGIPIPQAHTSDLMTSGMFFGSAATPSSMSPGGAMTPWAQANTPYVGSEWSPQNMMGSGMTPGGAAFSPSAASDASGMSPAYGAWSPTPQSPAMSPYMASPHGQSPSYSPSSPAFIPTSPSMTPTSPGYSPSSPGYSPTSPNYSPTSPSYSPTSPSYSPTSPSYSPTSPSYSPTSPSYSPTSPSYSPTSPSYSPTSPSYSPTSPSYSPTSPSYSPTSPSYSPTSPNYSPTSPNYSPTSPSYSSTSPSYSPTSPSYSPSSPSYSPSSPRYTPASPNYSPTSPSYSPSSPQYSSASPSYSPSSPKYSPTSPSYSPTSPSFSGGSPQYSPTSPSYSPTSPSYSPSSPQHTPAGSSRYSPSSPNYSPSSPSYSPTSPQYSPRSTKYSPTSPTYTPTSPSYSPASPAYSPQPPRYSPSSPSYSPTSPGQDND

SEQ ID NO: 624 - protein, 176 aa, Phyllotreta armoraciae
MKAKGELKEYEVIGRKLPTDKEKSPPLYKMRIFSPDPIVAKSRFWYFLRQLRKFKKTTGEIVSVKPVPEKTPTKIKNFGIWLRYDSRSGTHNMYREYRDLSVSGAVTACYRDMGARHRARAHAIQIIKVEQVKSSDTRRPQVKQFHDSKIRFPLPKRIQHKSMNRFSVRKPRTYFL

SEQ ID NO: 625 - protein, 135 aa, Phyllotreta armoraciae
MGKIMKSGKVVLVLGGRYAGKKAVVIKTCDDGTSDKQYGHALVAGIDRYPRKIHKRMGKGKMHKRSKIKPFIRILNYNHLMPTRYSVDLASDLKVTPKDLKDPMKRKKARFQTRVKFEERYKQGKNKWFFQKLRF

SEQ ID NO: 626 - protein, 134 aa, Phyllotreta armoraciae
MAIRPVYRPKIVKKRTKKFIRHQSDRYSKLKRNWRKPKGIDNRLRRRSKGQYLMPNIGYGSASKTRHMLPTGFRKVLVHNVKELEVLLLQNRKYCAEIAHGVSLKKRKDIVERAQQLSIRVTNGHARLRSQENE

SEQ ID NO: 627 - protein, 139 aa, Phyllotreta armoraciae
MANTNTDLIEEDAADLQFPKEFENAETLLISEVHMLLEHRKEQNESLEDEQEFSDVFMKTLTYTDRFRKFKNKETISAVRNLLMQTKKLHKFELAAIANLCPETTEEAKSLIPSLEGRLEDEELQSILDDIQTKRSIQY

SEQ ID NO: 628 - protein, 573 aa, Phyllotreta armoraciae
MSYKRKAESQIPAEESDQLIIRPLGAGQEVGRSCIMIEFKGKKIMLDCGIHPGLSGMDALPFVDLIEADEIDILLISHFHLDHSGALPWFLLKTSFKGRCFMTHATKAIYRWLLSDYIKVSNIATEQMLYTEADLEASMDKIETINFHEEKDVLGVKFWAYNAGHVLGAAMFMIEIAGVKILYTGDFSRQEDRHLMAAEIPTIHPDVLITESTYGTHIHEKREDRETRFTTLVHDIVNRGGRCLIPVFALGRAQELLLILDEYWSQHPELHDIPIYYASSLAKKCMAVYQTYINAMNDKIKRQIAINNPFVFKHISNLKGIDHFDDIGPCVVMASPGMMQSGLSRELFETWCTDAKNGVIIAGYCVEGTLAKTILSEPEEITTMVGQKLPLKMSVDYISFSAHTDYQQTSEFIRILKPPHLVLVHGEQNEMNRLKAALQREYEDDSNTTINIYNPRNTHSVELYFRGEKTAKVMGQLAVDEPQTGKTLNGILVKRNFNYHVLSPEDLPSKLILDVRRIRVMHLICRIHRFEYKPNTAKAEFALFWQQRGFEVHDIPSSRSVGIHRWGEENARI

SEQ ID NO: 629 - protein, 1330 aa, Phyllotreta armoraciae
MDNIPRTHEDIEAQIRDIQSKKKEAEKASESPPEKVAKLGEGGYFDSDIYEGKGKYEGYVTSIAANDEVDDEEEDVGYTHKRPGLGAPVALLNDVAQSDKDYDPFADRRRPTIADREDEYRQKRRRMIISPERVDPFADGGKTPDVQARNYSKIMKEQMLKGEELELRKKIIEKSKDGSLKTTNGDSTKSAAPKKRGRWDQTVDDAVVPQKKKTLSVSTSSSAATPVWEGDKTPADIRWDETPGHKGSETPGATPGQSTRMWDATPGPATPGRETPGHSGDKSTSRRNRWDETPKTERETPGHSSGWAETPRTDRIGADLIQETPTPGASKRRSRWDETPSATPSQAMTPGAMTPSTPHGTPHATPTHGHATPLLTPGGSTPVGAKAMSMATPTPGHLASMTPEQLQAYRWEREIDERNRPYSDDELDAMFPPGYKILPPPAGYVPIRTPARKLTATPTPLVGGTPTGFFIQQEDKSAKYMDNQPKGQNLPFMKPEDAQYFDKLLVDVDEDALAPEEQKERKIMKLLLKIKNGTPPMRKAALRQITDKAREFGAGPLFNQILPLLMSPTLEDQERHLLVKVIDRILYKLDDLVRPYVHKILVVIEPLLIDEDYYARVEGREIISNLAKAAGLATMISTMRPDIDNIDEYVRNTTARAFAVVASALGIPSLLPFLKAVCRSKKSWQARHTGIKIVQQIAILMGCAILPHLKSLVEIIEHGLVDEQQKVRTITALGIAALAEAATPYGIESFDSVLKPLWKGIRTHRGKGLAAFLKAIGYLIPLMDSEYANYYTREVMLILIREFQSPDEEMKKIVLKVVKQCCSTDGVESQYIKEEILPQFFKHFWNHRMALDRRNYRQLVDTTVEIANKVGASEIINRIVDDLKDENEAYRKMVMESIEKIMGNLGAADVDSRLEEQLIDGILYAFQEQTTEDVVMLNGFGTIVNQLGKRVKPYLPQICGTILWRLNNKSAKVRQQAADLISRIAVVMKTCQEEKLMGHLGVVLYEYLGEEYPEVLGSILGALKAIVNVIGMTKMTPPIKDLLPRLTPILKNRHEKVQENCIDLVGRIADRGPEYVSAREWMRICFELLELLKAHKKAIRRATVNTFGYIAKAIGPHDVLATLLNNLKVQERQNRVCTTVAIAIVAETCSPFTVLPALMNEYRVPELNVQNGVLKSLSFLFEYIGEMGKDYIYAVAPLLEDALMDRDLVHRQTACAAIKHMSLGVYGFGCEDALVHLLNYVWPNIFETSPHLVQAFMDAIEGMRVALGPVKILQYTLQGLFHPARKVRDVYWKIYNSLYIGGQDALVAGYPRIMNDPKNQYVRYELDYIL

SEQ ID NO: 630 - protein, 267 aa, Psylliodes chrysocephala
MSKVNEVADLYKQLKSEWNTKNPNLSKCEKFLSQLKLELTHLMFLPTSTATATKQELLLARDVLEIGVQWSIAANDITAFERYMAQLKCYYFDYNNQLPESAFKYQLLGLNLLFLLSQNRVAEFHTELELLPSDHIQNDVYIRHPLSIEQYLMEGSYNKIFLAKGNVPAANYNFFMDILLDTIRVEIADCLSVAYEKISVKDIARMLYLPNEEAAKNFAKKAFQNKAWKLNNEFFHFIPEEKTHEPIPSKELAQQAIEYAKELEMIV

SEQ ID NO: 631 - protein, 151 aa, Psylliodes chrysocephala
MGRMHAPGKGIAQSALPYRRSVPTWLKVTPEEVKDHIFKLGKKGLTPSQIGVILRDSYGVAQVRFVSGNKILRIMKAMGLAPDLPEDLYYLIKKAVAIRKHLERNRKDKDSKFRLILVESRIHRLARYYKTKSVLAPNWKYESSTASALVA

SEQ ID NO: 632 - protein, 268 aa, Psylliodes chrysocephala
MAVGKNKGLSKGGKKGVKKKVVDPFTRKDWYDVKAPSMFATRQVGKTLVNRTQGTKIASEGLKFRVFEVSLADLQNDNDAERSFRKFRLIAEDVQGRNVLTNFHGMDLTTDKLRSMVKKWQTLIEASADVKTSDGYLLRVFCIGFTNKDQLSQRKTCYAQHTQVRAIRKKMVEIITRDIQGSDIKEVVNKLLPDSIAKDIEKACQGIYPLHDVYIRKVKVLKKPRFELSKLLELHGDGGKGGAGDVGGEAGSKVDRPEGYEPPVQESV

SEQ ID NO: 633 - protein, 274 aa, Psylliodes chrysocephala
MSYVLCPEIPAPGFSFDNCKRNATLESKGFAVPKAIKTGTTIVGITYKDGVILGADTRATEDTTVADKNCEKIHYLAPNMYCCGAGTAADTEMTTQMVAAQLELHKLYTNRESRVATANQLLKQYLFSYQGYIGAALILGGVDIEGPHLYMIHPHGSSVDLPYGTMGSGSLAAIAVFELGWKPDMEEEAGVQLVRDAIAAGIFNDLGSGSNVDICVIRKGSVDYKRTYDEANKKGVKQGSYKYPRGTTAVLSTKVLDVEEVSVTPIEAERMDVV

SEQ ID NO: 634 - protein, 193 aa, Psylliodes chrysocephala
MAPVAKPKDAKDKRDVKDKTKNHMRELHIRKLCLNICVGESGDRLTRAAKVLEQLTGQQPVFSKARYTVRSFGIRRNEKIAVHCTVRGAKAEEILERGLKVREYELRRDNFSASGNFGFGIQEHIDLGIKYDPSIGIYGLDFYVVLGRPGFNVAHRRAKRGKVGFSHRLTKEDAMKWFQQKYDGIILASKAKK

SEQ ID NO: 635 - protein, 152 aa, Psylliodes chrysocephala
MALVIPEKFQHILRILGTNIDGKRKVQFALTAIKGVGRRYSNIVLKKADVNLDKRAGECSEEEVEKIITIMSNPRQYKIPDWFLNRQKDIIDGKYSQLTSSSLDSKLREDLERMKKIRAHRGMRHYWGLRVRGQHTKTTGRRGRTVGVSKKK

SEQ ID NO: 636 - protein, 291 aa, Psylliodes chrysocephala
MSSNVQKAQQLMAEAEKKVSSRGFFGSLFGGSSRIEDAVECYQRAANLFKMAKSWDSAGKAFCEAANLHSRSGARHDAATNYVDAANCYKKADINESVNCLLKAIEIYTDMGRFTMAAKHHQTIAEMYETDSVDLERAVQHYEQAADYFRGEESNSSANKCLLKVAQYAAQLENYEKAIQIYQEVAYSALESSLLKYSAKEYLFRAALCHLCVDVLNAQHAIESYIQRYPAFQDSREYKLLKSLIEHIEEQNVDGYTDAVKDYDSISRLDQWYTTILLRIKKQLNESPDLR

SEQ ID NO: 637 - protein, 123 aa, Psylliodes chrysocephala
MPPKTSGKAAKKAGKAQKNISKTDKKKKRRRKESYAIYIYKVLKQVHPDTGISSKAMSIMNSFVNDIFERIAAEASRLAHYNKRSTITSREIQTAVRLLLPGELAKHAVSEGTKAVTKYTSSK

SEQ ID NO: 638 - protein, 117 aa, Psylliodes chrysocephala
MASHQSHGVQQLLAAEKRAADKVTEARKRKARRLKQAKEEAQDEIEKYRKERERQFREFEAKHMGSKEDVAAKIEVDTKRRIEEMNKAIISQKEPVILEILKLVYDIKPEIHKNYRQ

SEQ ID NO: 639 - protein, 124 aa, Psylliodes chrysocephala; identical to SEQ ID NO: 622

SEQ ID NO: 640 - protein, 1897 aa, Psylliodes chrysocephala
MAATDSKAPLRTVKRVQFGILSPDEIRRMSVTEGGIRFPETMEAGRPKLCGLMDPRQGVIDRSSRCQTCAGNMTECPGHFGHIDLAKPVFHVGFVTKTIKILRCVCFFCSKLLVSPNNPKIKEVVMKSKGQPRKRLTFVYDLCKGKNICEGGDEMDVGKEGDENKKAGHGGCGRFQPNIRRAGLDLTAEWKHANEDTQEKKIALSAERVWEILKHITDEECFILGMDPKFARPDWMIVTVLPVPPLCVRPAVVMFGSARNQDDLTHKLADIIKSNNDLQKNEAAGAAAHIITENIKMLQFHVATLVDNDMPGMPRAMQKSGKPLKAIKARLKGKEGRIRGNLMGKRVDFSARTVITPDPNLRIDQVGVPRSIAQNMTFPEIVTPFNFDKMLELVQRGNSQYPGAKYIIRDNGERIDLRFHPKPSDLHLQCGYKVERHIRDGDLVIFNRQPTLHKMSMMGHRVKVLPWSTFRMNLSCTSPYNADFDGDEMNLHVPQSMETRAEVENIHITPRQIITPQANKPVMGIVQDTLTAVRKMTKRDVFIEKEQMMNLLMFLPIWDGKMPRPAILKPKPLWTGKQLFSLIIPGNVNMIRTHSTHPDEEDDGPYKWISPGDTKVMVEHGELVMGILCKKTLGTSAGSLLHICMLELGHEVCGRFYGNIQTVINNWLLLEGHSIGIGDTIADPQTYTEIQRAIKKAKEDVIEVIQKAHNMELEPTPGNTLRQTFENQVNRILNDARDKTGGSAKKSLTEYNNLKAMVVSGSKGSNINISQVIACVGQQNVEGKRIPFGFRKRTLPHFIKDDYGPESRGFVENSYLAGLTPSEFYFHAMGGREGLIDTAVKTAETGYIQRRLIKAMESVMVHYDGTVRNSVGQLIQLRYGEDGLCGEMVEFQTLSTVKLSNKAFERKFRFDPSNERYLRRVFNEEVIKQLMGSGEVISELEREWEQLQKDREALRQIFPSGESKVVLPCNLQRMIWNVQKIFHINKRSPTDLSPLRVIQGVRTLLKKCIIVAGEDRLSKQANENATLLFQCLVRSTLCTKCVSEEFRLSTEAFEWLIGEIETRFQQAQANPGEMVGAIAAQSLGEPATQMTLNTFHFAGVSSKNVTLGVPRLKEIINISKKPKAPSLTVFLTGAAARDAEKAKNVLCRLEHTTLRKVTANTAIYYDPDPQNTVIPEDQEFVNVYYEMPDFDPTRISPWLLRIELDRKRMTDKKLTMEQIAEKINAGFGDDLNCIFNDDNAEKLVLRIRIMNSDDGKFGEGADEDVDKMDDDMFLRCIEANMLSDMTLQGIEAISKVYMHLPQTDSKKRIVITDTGEFKAIAEWLLETDGTSMMKVLSERDVDPVRTFSNDICEIFSVLGIEAVRKSVEKEMNAVLQFYGLYVNYRHLALLCDVMTAKGHLMAITRHGINRQDTGALMRCSFEETVDVLMDAASHAEVDPMRGVSENIIMGQLPRMGTGCFDLLLDAEKCKMGIPIPQAHSSDLMASGMFFGSAATPSSMSPGCAMTPWAAANTPYVGSAWSPQNLMGSGMTPGGAAFSPSAASDASGMSPGYGAWSPTPQSPAMSPYMGSPHGQSPSYSPSSPAFLPTSPSMTPTSPRYSPSSPGYSPTSPNYSPTSPSYSPTSPSYSPTSPNYSPTSPSYSPTSPSYSPTSPSYSPTSPSYSPTSPSYSPTSPSYSPTSPSYSPTSPSYSPTSPSYSPTSPSYSPTSPSYSPTSPSYSPTSPSYSPTSPSYSPSSPRYTPASPSYSPTSPSYSPSSPQYSPASPSYSPSSPKYSPTSPNYSPTSPSFSGGSPQYSPTSPSYSPTSPSYSPSSPQHTPAGSSRYSPSSPNYSPSSPSYSPTSPQYSPHSTKYSPTSPTYTPTSPSYSPASPAYSPQPPRYSPSSPSYSPTSPNQDND

SEQ ID NO: 641 - protein, 176 aa, Psylliodes chrysocephala
MKAKGELKEYEVIGRKLPTEKEKNTPLYKMRIFSPDPIVAKSRFWYFLRQLRKFKKTTGEIVSVRLIPEKTPVKIKNFGIWLRYDSRSGTHNMYREYRDLSVSGAVTACYRDMGARHRARAHAIQIIKVEQVKASDTRRPQVKQFHDSKIRFPLPKRIQHRSMNRFSVRKPRTYFL

SEQ ID NO: 642 - protein, 135 aa, Psylliodes chrysocephala
MGKIMKSGKVVLVLGGRYAGRKAVVIKTYDDGTSDKQYGHALVAGIDRYPRKIHKRMGKGKMHKRSKIKPFIKVLNYNHLMPTRYSVDLASDLKVTPKELKDPMKRKKARFQTRVKFEERYKQGKNKWFFQKLRF

SEQ ID NO: 643 - protein, 134 aa, Psylliodes chrysocephala
MSIRPVYRPKIVKKRTKKFIRHQSDRYGKLKRNWRKPKGIDNRVRRRFKGQYLMPNIGYGSAAKTRHMLPTGFRKVLVHNVKELEVLLMQNRKYCAEIAHGVSSKKRKDIVERAQQLSIRVTNGHARLRSQENE

SEQ ID NO: 644 - protein, 139 aa, Psylliodes chrysocephala
MANTNTDLTEEDAADLQFPKEFENAETLLISEVHMLLEHRKDQNESAEDEQEFSDVFMKTLTYTDRFRKFKNKETISAVRNLLMQTKKLHKFELAAIANLCPETTEEAKSLIPSLEGRFEDEELQAILDDIQTKRSIQY

SEQ ID NO: 645 - protein, 688 aa, Psylliodes chrysocephala
MAYKRKPDSQVPAEESDQLIIRPLGAGQEVGRSCIMIEFKGKKIMLDCGIHPGLSGMDALPFVDLIEADEVDFLLISHFHLDHSGALPWFLQKTSFKGRCFMTHATKAIYRWLLSDYIKVSNIATEQMLYTEADLEASMDKIETINFHEEKDIMGVKFWAYNAGHVLGAAMFMLEIAGVKILYTGDFSRQEDRHLMAAEIPTVHPDVLITESTYGTHIHEKREDRESRFTSLVNEIVNRGGRCLIPVFALGRAQELLLILDEYWSLHPELHDIPIYYASSLAKKCMAVYQTYINAMNDKIKRQIAVNNPFVFKHISNLKGIDHFEDIGPCVVMASPGMMQSGLSRELFETWCTDVKNGVIIAGYCVEGTLAKTILSEPEEITTMVGQKLPLKMSVDYISFSAHTDYQQTSEFIRLLKPPHVVLVHGEQNEMNRLKAALQREYEDDPNTTINIYNPRNTHSVELYFRGEKTAKVMGKLAVDQPQAGKTLNGILVKRNFNYHILSPDDLSKYTDLNISQILQRQSLHYSGNSGVLRYMISQVAGLLESIDGEKKMKAFNAIDITIEHKIVTLEWVANPVNDMYADSIVAAILQADLLDVPVKNMTTSVKIDRMHFKECLIEMLQDMFGEDSVPKIFKGEKLYVTVNDKRADIDLTNLEVKCAEDETFQQIVHTAVTKLYQSLAPPQFETV

SEQ ID NO: 646 - protein, 1327 aa, Psylliodes chrysocephala
MENIPRTHEDIEAQIREIQSKKKEVPADISPDKVAKLGEGGFFDNEIYEGKGKYEGYVTSIAANDEVDDDEEDVGFSHKRTGLGAPVALLNDVAQSDKDYDPFADRRRATIADREDEYRQRRRRMIISPERVDPFADGGKTPDFQTRNYSQIMKEQLLKGEENELRKKIIERSKEGTLKPTNGEAKSTPKKRGRWDQTVDEVVVPQKKKTLSVSTSSASATPVWEGDKTPADIRWDETPGHKGSETPGATPGQSTRMWDSTPGPATPGRETTPGHGGDKSTSRRNRWDETPKTERETPGHSSGWAETPRTDRTGADLIQETPTPGASKRRSRWDETPSATPSQVMTPGAMTPTTPHGTPHGTPSHGHSTPLLTPGGSTPVGVKAMAMATPTPGHLASMTPEQLQAYRWEREIDERNRPYSDEELDAMFPPGYKVLPPPAGYIPIRTPARKLTATPTPLVGGTPTGFFMQQEDKQAKYLDNQPKGQNLPFMKPEDAQYFDKLLVDVDEEALSPEEQKERKIMKLLLKIKNGTPPMRKAALRQITDKAREFGAGPLFNQILPLLMSPTLEDQERHLLVKVIDRILYKLDDLVRPYVHKILVVIEPLLIDEDYYARVEGREIISNLAKAAGLATMISTMRPDIDNIDEYVRNTTARAFAVVASALGIPSLLPFLKAVCRSKKSWQARHTGIKIVQQIAILMGCAILPHLKSLVEIIEHGLVDEQQKVRTITALGIAALAEAATPYGIESFDSVLKPLWKGIRTHRGKGLAAFLKAIGYLIPLMDAEYANYYTREVMLILIREFQSPDEEMKKIVLKVVKQCCSTDGVEAQYIKEEILPQFFKHFWNHRMALDRRNYRQLVDTTVEIANKVGASEIINRIVDDLKDENEAYRKMVMESIEKIMGNLGAADIDSRLEEQLIDGILYAFQEQTTEDVVMLNGFGTIVNQLGKRVKPYLPQICGTILWRLNNKSAKVRQQAADLISRIAVVMKTCQEEKLMGHLGVVLYEYLGEEYPEVLGSILGALKAIVNVIGMTKMTPPIKDLLPRLTPILKNRHEKVQENCIDLVGRIADRGPEYVSAREWMRICFELLELLKAHKKAIRRATVNTFGYIAKAIGPHDVLATLLNNLKVQERQNRVCTTVAIAIVAETCSPFTVLPALMNEYRVPELNVQNGVLKSLSFLFEYIGEMGKDYIYAVAPLLEDALMDRDLVHRQTACAAIKHMALGVYGFGCEDALVHLLNYVWPNIFETSPHLVQAFMDAIEGMRVALGPIKILQYTLQGLFHPARKVRDVYWKIYNSLYIGGQDSLVCGYPRIANDPKNQYIRYELDYVL

SEQ ID NO: 647 - protein, 267 aa, Phyllotreta nemorum
MSKVNEVADLYKQLKSEWNTKNPNLSKCEKLLSQLKLELTNLMFLPTSTATATKQELLLARDVLEIGVQWSVAANDITAFERYMAQLKCYYFDYNNQLPESAFKYQLLGLNLLFLLSLNRVAEFHTELELLPADHIQNDVYIRHPLSIEQYLMEGSYNKIFLAKGNVPAASYTFFMDILLDTIRVEIADCLSVAYEKISVKDFTRMLYLPNEETAKNFAKKAFQNKAWKLDHDYFYFIPEQKTHEPIPSKELAQQAIEYAKELEMIV

SEQ ID NO: 648 - protein, 151 aa, Phyllotreta nemorum; identical to SEQ ID NO: 614

SEQ ID NO: 649 - protein, 268 aa, Phyllotreta nemorum
MAVGKNKGLSKGGKKGVKKKVIDPFTRKDWYDVKAPSMFTTRQVGKTLVNRTQGTRIASEGLKFRVFEVSLADLQNDNDAERSFRKFRLIAEDVQGRNVLTNFHGMDLTTDKLRSMVKKWQTLIEASADVKTSDGFLLRVFCIGFTNKDQHSQRKTCYAQHTQVRAIRKKMVEIITRDIQGSDIKEVVNKLLPDSIAKDIEKACQGIYPLHDVYIRKVKVLKKPRFDLSKLLELHGDGGKGGAGDTTGEGGSKVDRPEGYEPPVQETV

SEQ ID NO: 650 - protein, 276 aa, Phyllotreta nemorum
MSYTLCPEIPAPGFSFENCKRNALLESKGFTTPKAIKTGTTIVGIVYKDGVILGADTRATEDTTVADKNCEKIHFLAPNMYCCGAGTAADTEMTTQMVAAQLELHKLYTNREARVATANQLLKQYLFSYQGYIGAALILGGVDIEGPHLHMIYPHGSSVDLPYATMGSGSLAAISVFELGWKPEMGEEEGIQLVRNAIAAGIFNDLGSGSNVDVCIIRKGVVDYRRTYDEANKKGVRQGSYKFPRGATAVLSTKVVDVEEVSVTPVEAERMDVSSI

SEQ ID NO: 651 - protein, 168 aa, Phyllotreta nemorum
MRELHIRKLCLNICVGESGDRLTRAAKVLEQLTGQQPVFSKARYTVRSFGIRRNEKIAVHCTVRGAKAEEILERGLKVREYELRRDNFSISGNFGFGIQEHIDLGIKYDPSIGIYGLDFYVVLGRPGFNVAHRRAKKGKVGFSHRLTKEDAMKWFQQKYDGIILASKK

SEQ ID NO: 652 - protein, 142 aa, Phyllotreta nemorum
MSLVIPEKFQHILRILGTNIDGKRKVQFALTAIKGVGRRYSNIVLKKADVNLDKRAGECSDEEVEKIITIMSNPRQYKIPDWFLNRQKDIIDGKYSQLTSSSLDSKLREDLERMKKIRAHRGMRHYWGLRVRGQHTKTTGRR

SEQ ID NO: 653 - protein, 291 aa, Phyllotreta nemorum
MSSNEQKAQQLIAEAEKKVSSRGFFGSLFGGSNRIEDAVECYQRAANLFKMAKNWDAAGKAFCEAANLHSRSGARHDSATNFVDAANCYKKADVSEAVNCLLKAIEIYTDMGKFTMAAKYHQNIAEMYETDPVDLERAVQHYEQAADYFRGEESNSSANKCLLKVAQYAAQLENYEKAIQIYQEVAFSALESSLLKYSAKEYLFRAALCHLCVDILNAQHAVESYIQRYPAFQDSREYKLLKTLMEHIEEQNVDGYTDAVNDYDSISRLDPWYTTILLRIKKQLNESPDLR

SEQ ID NO: 654 - protein, 76 aa, Phyllotreta nemorum
PDTGISSKAMSIMNSFVNDIFERIAAEASRLAHYNKRSTITSREIQTAVRLLLPGELAKHAVSEGTKAVTKYTSSK

SEQ ID NO: 655 - protein, 117 aa, Phyllotreta nemorum
MASHQSQGVQQLLAAEKRAADKVTEARKRKARRLKQAKEEAQDEIEKYRKERERQFREFEAKHMGSKEDVASKIEQDTKRRIEDMNKAIQSQKEPVIENILELVYDIKPEIHKNYRQ

SEQ ID NO: 656 - protein, 124 aa, Phyllotreta nemorum; identical to SEQ ID NO: 622

SEQ ID NO: 657 - protein, 1897 aa, Phyllotreta nemorum
MAATDSKAPLRTVKRVQFGILSPDEIRRMSVTEGGIRFPETMEAGRPKICGLMDPRQGVIDRSSRCQTCAGNMTECPGHFGHVDLAKPVFHIGFITKTIKILRCVCFFCSKLLVSPNNPKIKEIVMKTKGQPRKRLTFVYDLCKGKNICEGGDEMDVGKEGDESKKAGHGGCGRYQPNIRRIGLDLTAEWKHVNEDTQEKKIALSAERVWEILKHITDEECFILGMDPKFARPDWMIVTVLPVPPLSVRPAVVMYGSARNQDDLTHKLADIIKSNNELQKNEAAGAAAHIITENIKMLQFHVATLVDNDMPGMPRAMQKSGKPLKAIKARLKGKEGRIRGNLMGKRVDFSARTVITPDPNLRIDQVGIPRSIAQNMTFPEIVTPFNFDKMLELVQRGNSQYPGAKYIIRDNGERIDLRFHPKPSDLHLQWGYKVERHIRDGDLVIFNRQPTLHKMSMMGHRVKVLPWSTFRMNLSCTSPYNADFDGDEMNLHVPQSMETRAEVENIHITPRQIITPQANKPVMGIVQDTLTAVRKMTKRDVFIEKEQMMNLLMFLPIWDGKMPRPAILKPKPLWTGKQLFSLIIPGNVNMIRTHSTHPDDEDDGPYKWISPGDTKVMVEHGELVMGILCKKTLGTSAGSLLHICILELGHEVCGRFYGNIQTVINNWLLLEGHSIGIGDAIADPQTYTEIRRAIKKAKEDVIEVIQKAHNMELEPTPGNTLRQTFENQVNRILNDARDKTGGSAKKSLTDYNNLKAMVVSGSKGSNINISQVIACVGQQNVEGKRIPFGFRKRTLPHFIKDDYGPESRGFVENSYLAGLTPSEFYFHAMGGREGLIDTAVKTAETGYIQRRLIKAMESVMVHYDGTVRNSVGQLIQLRYGEDGLCGEMVEFQTLSTVKLSNKAFERKFRFDPSNERYLRRVFNEEVIKQLMGSGEVISELEREWDQLQKDREALRQIFPSGESKVVLPCNLQRMIWNVQKIFHINKRAPTDLSPLRVIQGVRELLKKCIIVAGEDRLSKQANENATLLFQCLVRSTLCTKCVSEEFRLSTEAFEWLIGEIETRFQQAQVNPGEMVGALAAQSLGEPATQMTLNTFHFAGVSSKNVTLGVPRLKEIINISKKPKAPSLTVFLTGAAARDAEKAKNVLCRLEHTTLRKVTANTAIYYDPDPQNTVIPEDQEFVNVYYEMPDFDPTRISPWLLRIELDRKRMTDKKLTMEQIAEKINAGFGDDLNCIFNDDNAEKLVLRIRIMNSDDEKFGDGADEDVDKMDDDMFLRCIEANMLSDMTLQGIEAISKVYMHLPQTDSKKRIVITDTGEFKAIAEWLLETDGTSMMKVLSERDVDPVRTFSNDICEIFSVLGIEAVRKSVEKEMNAVLQFYGLYVNYRHLALLCDVMTAKGHLMAITRHGINRQDTGALMRCSFEETVDVLMDASSHAEVDPMRGVSENIILGQLPRMGTGCFDLLLDADKCKMGIPIPQAHSSDLMTSGMFFGSAATPSSMSPGGAMTPWAQANTPYVGSEWSPQNMMGSGMTPGGAAFSPSAASDASGMSPAYGAWSPTPQSPAMSPYMASPHGQSPSYSPSSPAFIPTSPSMTPTSPGYSPSSPGYSPTSPNYSPTSPSYSPTSPSYSPTSPSYSPTSPSYSPTSPSYSPTSPSYSPTSPSYSPTSPSYSPTSPSYSPTSPSYSPTSPSYSPTSPNYSPTSPNYSPTSPSYSSTSPSYSPTSPSYSPSSPSYSPSSPRYTPASPNYSPTSPSYSPSSPQYSSASPSYSPSSPKYSPTSPSYSPTSPSFAGGSPQYSPTSPSYSPTSPSYSPSSPQHTPAGSSRYSPSSPNYSPSSPSYSPTSPQYSPRSTKYSPTSPTYTPTSPSYSPASPAYSPQPPRYSPSSPSYSPTSPGQDND

SEQ ID NO: 658 - protein, 176 aa, Phyllotreta nemorum
MKAKGELKEYEVIGRKLPTDKEKSPPLYKMRIFSPDPSVAKSRFWYVLSQLRKFKKTTGEIVSVKPVPEKTPTKIKNFGIWLRYASRSGTHNMYREYRDLSVSGAVTACYRDMGARHRASAHAIQIIKVEQVKSSDTRRPQVQQFHDSKIRFPLPKRIQHQSMNRFSVRKPRTYFL

SEQ ID NO: 659 - protein, 135 aa, Phyllotreta nemorum
MGKIMKSGKVVLVLGGRYAGKKAVVIKTYDDGTSDKQYGHALVAGIDRYPRKIHKRMGKGKMHKRSKIKPFIRILNYNHLMPTRYSVDLASDLKVTPKDLKDPMKRKKVRFQTRVKFEERYKQGKNKWFFQKLRF

SEQ ID NO: 660 - protein, 134 aa, Phyllotreta nemorum
MAIRPVYRPKIVKKRTKKFIRHQSDRYSKLKRNWRKPKGIDNRVRRRFKGQYLMPNIGYGSASKTRHMLPTGFRKVLVHNVKELEVLLMQNRKYCAEIAHGVSSKKRKDIVERAQQLSIRVTNGHARLRSQENE

SEQ ID NO: 661 - protein, 139 aa, Phyllotreta nemorum; identical to SEQ ID NO: 627

SEQ ID NO: 662 - protein, 402 aa, Phyllotreta nemorum
MAVYQTYINAMNDKIKRQIAINNPFVFKHISNLKGIDHFDDIGPCVVMASPGMMQSGLSRELFETWCTDAKNGVIIAGYCVEGTLAKTILSEPEEITTMVGQKLPLKMSVDYISFSAHTDYQQTSEFIRILKPPHLVLVHGEQNEMNRLKAALQREYEDDSNTTINIYNPRNTHSVELYFRGEKTAKVMGQLAVDEPKTGKTLNGILVKRNFNYHVLSPDDLPKYTDLNISQILQRQSLHYSGNSGVLRYMISQVAGLLESIDGEKKMRAFNAVDIIIENKIVILEWVANPVNDMYADAIVAAILQADLLEAPIKNVTTSVKMDRMHFKECLIEMLQDMFGEDSVPKIFKGEKLYVAVNDKRADIDLNNLDVKCPEDETFQQIVQTAVTKLYQSLAPPQFES

SEQ ID NO: 663 - protein, 1177 aa, Phyllotreta nemorum
MKEQMLKGEELELRKKIIEKSKDGSLKTTNGEATKSAAAPKKRGRWDQTVDDAVVPQKKKTLGVSTSSSAATPVWEGDKTPADIRWDETPGHKGSETPGATPGQSTRMWDATPGPATPGRETPGHSGDKSTSRRNRWDETPKTERETPGHSSGWAETPRTDRIGADLIQETPTPGASKRRSRWDETPSATPSQAMTPGAMTPSTPHGTPHATPTHGHATPLLTPGGSTPVGAKAMSMATPTPGHLASMTPEQLQAYRWEREIDERNRPYSDDELDAMFPPGYKVLPPPAGYVPIRTPARKLTATPTPLVGGTPTGFFIQQEDKSAKYMDNQPKGQNLPFMKPEDAQYFDKLLVDVDEDALAPEEQKERKIMKLLLKIKNGTPPMRKAALRQITDKAREFGAGPLFNQILPLLMSPTLEDQERHLLVKVIDRILYKLDDLVRPYVHKILVVIEPLLIDEDYYARVEGREIISNLAKAAGLATMISTMRPDIDNIDEYVRNTTARAFAVVASALGIPSLLPFLKAVCRSKKSWQARHTGIKIVQQIAILMGCAILPHLKSLVEIIEHGLVDEQQKVRTITALGIAALAEAATPYGIESFDSVLKPLWKGIRTHRGKGLAAFLKAIGYLIPLMDSEYANYYTREVMLILIREFQSPDEEMKKIVLKVVKQCCSTDGVESQYIKEEILPQFFKHFWNHRMALDRRNYRQLVDTTVEIANKVGASEIINRIVDDLKDENEAYRKMVMESIEKIMGNLGAADVDSRLEEQLIDGILYAFQEQTTEDVVMLNGFGTIVNQLGKRVKPYLPQICGTILWRLNNKSAKVRQQAADLISRIAVVMKTCQEEKLMGHLGVVLYEYLGEEYPEVLGSILGALKAIVNVIGMTKMTPPIKDLLPRLTPILKNRHEKVQENCIDLVGRIADRGPEYVSAREWMRICFELLELLKAHKKAIRRATVNTFGYIAKAIGPHDVLATLLNNLKVQERQNRVCTTVAIAIVAETCSPFTVLPALMNEYRVPELNVQNGVLKSLSFLFEYIGEMGKDYIYAVAPLLEDALMDRDLVHRQTACAAIKHMSLGVYGFGCEDALVHLLNYVWPNIFETSPHLVQAFMDAIEGMRVALGPVKILQYTLQGLFHPARKVRDVYWKIYNSLYIGGQDALVAGYPRIMNDPKNQYVRYELDYIL

SEQ ID NO: 664 - protein, 267 aa, Phyllotreta striolata
MSKVNEVADLYKQLKSEWNTKNPNLSKCEKLLSQLKLELTNLMFLPTSTATATKQELLLARDVLEIGVQWSVAANDITAFERYMAQLKCYYFDYNNQLPESAFKYQLLGLNLLFLLSLNRVAEFHTELELLPADHIQNDVYIRHPLSIEQYLMEGSYNKIFLAKGNVPAASYTFFMDILLDTIRVEIADCLSVAYEKISVKDFTRMLYLPNEEAAKNFAKKAFQNKAWKLDHDYFYFIPEQKAHEPIPSKELAQQAIEYAKELEMIV

SEQ ID NO: 665 - protein, 151 aa, Phyllotreta striolata; identical to SEQ ID NO: 614

SEQ ID NO: 666 - protein, 268 aa, Phyllotreta striolata
MAVGKNKGLSKGGKKGVKKKVIDPFTRKDWYDVKAPSMFTTRQVGKTLVNRTQGTRIASEGLKFRVFEVSLADLQNDNDAERSFRKFRLIAEDVQGRNVLTNFHGMDLTTDKLRSMVKKWQTLIEASADVKTSDGFLLRVFCIGFTNKDQHSQRKTCYAQHTQVRAIRKKMVEIITRDIQGSDIKEVVNKLLPDSIAKDIEKACQGIYPLHDVYIRKVKVLKKPRFDLSKLLELHGDGGKGGAGDTTGEGGSKVDRPEGYEPPVQESV

SEQ ID NO: 667 - protein, 276 aa, Phyllotreta striolata
MSYVLCPEIPEPGFSFENCKRNALLESKGFTTPKAIKTGTTIVGIVYKDGVILGADTRATEDTTVADKNCEKIHFLAPNMYCCGAGTAADTEMTTQMVAAQLELHKLYTNREARVATANQLLKQYLFSYQGYIGAALILGGVDIEGPHLHMIYPHGSSVDLPYATMGSGSLAAISVFELGWKPEMGEEEGIQLVRNAIAAGIFNDLGSGSNVDVCIIRKGVVDYRRTYDEANKKGVRQGSYKFPRGATAVLSTKVVDVEEVSVTPVEAERMDVAAF

SEQ ID NO: 668 - protein, 191 aa, Phyllotreta striolata
MAPVAKPKESKDKRDVKDKTKNHMRELHIRKLCLNICVGESGDRLTRAAKVLEQLTGQQPVFSKARYTVRSFGIRRNEKIAVHCTVRGAKAEEILERGLKVREYELRRDNFSISGNFGFGIQEHIDLGIKYDPSIGIYGLDFYVVLGRPGFNVAHRRAKKGKVGFSHRLTKEDAMKWFQQKYDGIILGSKK

SEQ ID NO: 669 - protein, 152 aa, Phyllotreta striolata
MSLVIPEKFQHILRILGTNIDGKRKVQFALTAIKGVGRRYSNIVLKKADVNLDKRAGECSDEEVEKIITIMSNPRQYKIPDWFLNRQKDIIDGKYSQLTSSSLDSKLREDLERMKKIRAHRGMRHYWGLRVRGQHTKTTGRRGRTVGVSKKK

SEQ ID NO: 670 - protein, 291 aa, Phyllotreta striolata
MSSNAQKAQQLIAEAEKKVSSRGFFGSLFGGSSRIEDAVECYQRAANLFKMAKNWDAAGKAFCEAANLHSRSGARHDAATNFVDAANCYKKADISEAVNCLLKAIEIYTDMGKFTMAAKYHQNIAEMYETDPVDLERAVQHYEQAADYFRGEESNSSANKCLLKVAQYAAQLENYEKAIQIYQEVAFSALESSLLKYSAKEYLFRAALCHLCVDILNAQHAVESYIQRYPAFQDSREYKLLKTLMEHIEEQNVDGYTDAVNDYDSISRLDPWYTTILLRIKKQLNESPDLR

SEQ ID NO: 671 - protein, 123 aa, Phyllotreta striolata; identical to SEQ ID NO: 620

SEQ ID NO: 672 - protein, 117 aa, Phyllotreta striolata
MASHQSHGVQQLLAAEKRAADKVTEARKRKARRLKQAKEEAQDEIEKYRKERERQFREFEAKHMGSKEDVASKIEQDTKRRIEDMNKAIQSQKEPVIQSILGLVYDIKPEIHKNFRQ

SEQ ID NO: 673 - protein, 124 aa, Phyllotreta striolata; identical to SEQ ID NO: 622

SEQ ID NO: 674 - protein, 1760 aa, Phyllotreta striolata
MAATDSKAPLRTVKRVQFGILSPDEIRRMSVTEGGIRFPETMEAGRPKICGLMDPRQGVIDRSSRCQTCAGNMTECPGHFGHVDLAKPVFHIGFITKTIKILRCVCFFCSKLLVSPNNPKIKEIVMKTKGQPRKRLTFVYDLCKGKNICEGGDEMDVGKEGDEGKKAGHGGCGRYQPNIRRIGLDLTAEWKHVNEDTQEKKIALSAERVWEILKHITDEECFILGMDPKFARPDWMIVTVLPVPPLSVRPAVVMYGSARNQDDLTHKLADIIKSNNELQKNEAAGAAAHIITENIKMLQFHVATLVDNDMPGMPRAMQKSGKPLKAIKARLKGKEGRIRGNLMGKRVDFSARTVITPDPNLRIDQVGIPRSIAQNMTFPEIVTPFNFDKMLELVQRGNSQYPGAKYIIRDNGERIDLRFHPKPSDLHLQWGYKVERHIRDGDLVIFNRQPTLHKMSMMGHRVKVLPWSTFRMNLSCTSPYNADFDGDEMNLHVPQSMETRAEVENIHITPRQIITPQANKPVMGIVQDTLTAVRKMTKRDVFIEKEQMMNLLMFLPIWDGKMPRPAILKPKPLWTGKQLFSLIIPGNVNMIRTHSTHPDDEDDGPYKWISPGDTKVMVEHGELVMGILCKKTLGTSAGSLLHICILELGHEVCGRFYGNIQTVINNWLLLEGHSIGIGDAIADPQTYTEIRRAIKKAKEDVIEVIQKAHNMELEPTPGNTLRQTFENQVNRILNDARDKTGGSAKKSLTDYNNLKAMVVSGSKGSNINISQVIACVGQQNVEGKRIPFGFRKRTLPHFIKDDYGPESRGFVENSYLAGLTPSEFYFHAMGGREGLIDTAVKTAETGYIQRRLIKAMESVMVHYDGTVRNSVGQLIQLRYGEDGLCGEMVEFQTLSTVKLSNKAFERKFRFDPSNERYLRRVFNEEVIKQLMGSGEVISELEREWDQLQKDREALRQIFPSGESKVVLPCNLQRMIWNVQKIFHINKRAPTDLSPLRVIQGVRELLKKCIIVAGEDRLSKQANENATLLFQCLVRSTLCTKCVSEEFRLSTEAFEWLIGEIETRFQQAQVNPGEMVGALAAQSLGEPATQMTLNTFHFAGVSSKNVTLGVPRLKEIINISKKPKAPSLTVFLTGAAARDAEKAKNVLCRLEHTTLRKVTANTAIYYDPDPQNTVIPEDQEFVNVYYEMPDFDPTRISPWLLRIELDRKRMTDKKLTMEQIAEKINAGFGDDLNCIFNDDNAEKLVLRIRIMNSDDEKFGDGADEDVDKMDDDMFLRCIEANMLSDMTLQGIEAISKVYMHLPQTDSKKRIVITDTGEFKAIAEWLLETDGTSMMKVLSERDVDPVRTFSNDICEIFSVLGIEAVRKSVEKEMNAVLQFYGLYVNYRHLALLCDVMTAKGHLMAITRHGINRQDTGALMRCSFEETVDVLMDASSHAEVDPMRGVSENIILGQLPRMGTGCFDLLLDADKCKMGIPIPQAHSSDLMTSGMFFGSAATPSSMSPGGAMTPWAQANTPYVGSEWSPQNMMGSGMTPGGAAFSPSAASDASGMSPAYGAWSPTPQSPAMSPYMASPHGQSPSYSPSSPAFIPTSPSMTPTSPGYSPSSPGYSPTSPNYSPTSPSYSPTSPSYSPTSPSYSPTSPSYSPTSPSYSPTSPSYSPTSPSYSPTSPSYSPTSPSYSPTSPSYSPTSPSYSPTSPNYSPTSPNYSPTSPSYSSTSPSYSPTSPSYSPSSPSYSPSSPRYTPASPNYSPTSPSYSPSSPRY

SEQ ID NO: 675 - protein, 176 aa, Phyllotreta striolata; identical to SEQ ID NO: 624

SEQ ID NO: 676 - protein, 135 aa, Phyllotreta striolata
MGKIMKSGKVVLVLGGRYAGKKAVVIKTCDDGTSDKQYGHALVAGIDRYPRKIHKRMGKGKMHKRSKIKPFIKILNYNHLMPTRYSVDLASDLKVTAKDLKDPMKRKKARFQTRVKFEERYKQGKNKWFFQKLRF

SEQ ID NO: 677 - protein, 134 aa, Phyllotreta striolata; identical to SEQ ID NO: 660

SEQ ID NO: 678 - protein, 139 aa, Phyllotreta striolata; identical to SEQ ID NO: 627

SEQ ID NO: 679 - protein, 687 aa, Phyllotreta striolata
MSYKRKAESQIPAEESDQLIIRPLGAGQEVGRSCIMIEFKGKKIMLDCGIHPGLSGMDALPFVDLIEADEIDILLISHFHLDHSGALPWFLLKTSFKGRCFMTHATKAIYRWLLSDYIKVSNIATEQMLYTEADLEASMDKIETINFHEEKDVLGVKFWAYNAGHVLGAAMFMIEIAGVKILYTGDFSRQEDRHLMAAEIPTIHPDVLITESTYGTHIHEKREDRESRFTTLVHDIVNRGGRCLIPVFALGRAQELLLILDEYWSQHPELHDIPIYYASSLAKKCMAVYQTYINAMNDKIKRQIAINNPFVFKHISNLKGIDHFDDIGPCVVMASPGMMQSGLSRELFETWCTDAKNGVIIAGYCVEGTLAKTILSEPEEITTMVGQKLPLKMSVDYISFSAHTDYQQTSEFIRILKPPHLVLVHGEQNEMSRLKAALQREYEDDSNTTINIYNPRNTHSVELYFRGEKTAKVMGQLAVDEPQTGKTLNGILVKRNFNYHVLSPDDLPKYTDLNISQILQRQSLHYSGNSGVLRYMISQVAGLLESIDGEKKMRAFNAVDIIIENKIVVLEWVANPVNDMYADAIVAAILQADLLEQPIKNVTTSVKMDRMHFKECLIEMLQDMFGEDSVPKIFKGEKLYVAVNDKRADIDLNNLDVKCPEDETFQQIVQTAVTKLYQSLAPPQFES

SEQ ID NO: 680 - protein, 1176 aa, Phyllotreta striolata
MKEQMLKGEELELRKKIIEKSKDGSLKASNGDATKSAAPKKRGRWDQTVDDAVAPQKKKTLSVSTSSSAATPVWEGDKTPADIRWDETPGHKGSETPGATPGQSTRMWDATPGPATPGRETPGHSGDKSTSRRNRWDETPKTERETPGHSSGWAETPRTDRIGADLIQETPTPGASKRRSRWDETPSATPSQAMTPGAMTPSTPHGTPHATPTHGHATPLLTPGGSTPVGAKAMSMATPTPGHLASMTPEQLQAYRWEREIDERNRPYSDDELDAMFPPGYKILPPPAGYVPIRTPARKLTATPTPLAGGTPTGFFIQQEDKSAKYMDNQPKGQNLPFMKPEDAQYFDKLLVDVDEDALAPEEQKERKIMKLLLKIKNGTPPMRKAALRQITDKAREFGAGPLFNQILPLLMSPTLEDQERHLLVKVIDRILYKLDDLVRPYVHKILVVIEPLLIDEDYYARVEGREIISNLAKAAGLATMISTMRPDIDNIDEYVRNTTARAFAVVASALGIPSLLPFLKAVCRSKKSWQARHTGIKIVQQIAILMGCAILPHLKSLVEIIEHGLVDEQQKVRTITALGIAALAEAATPYGIESFDSVLKPLWKGIRTHRGKGLAAFLKAIGYLIPLMDSEYANYYTREVMLILIREFQSPDEEMKKIVLKVVKQCCSTDGVESQYIKEEILPQFFKHFWNHRMALDRRNYRQLVDTTVEIANKVGASEIINRIVDDLKDENEAYRKMVMESIEKIMGNLGAADVDSRLEEQLIDGILYAFQEQTTEDVVMLNGFGTIVNQLGKRVKPYLPQICGTILWRLNNKSAKVRQQAADLISRIAVVMKTCQEEKLMGHLGVVLYEYLGEEYPEVLGSILGALKAIVNVIGMTKMTPPIKDLLPRLTPILKNRHEKVQENCIDLVGRIADRGPEYVSAREWMRICFELLELLKAHKKAIRRATVNTFGYIAKAIGPHDVLATLLNNLKVQERQNRVCTTVAIAIVAETCSPFTVLPALMNEYRVPELNVQNGVLKSLSFLFEYIGEMGKDYIYAVAPLLEDALMDRDLVHRQTACAAIKHMSLGVYGFGCEDALVHLLNYVWPNIFETSPHLVQAFMDAIEGMRVALGPVKILQYTLQGLFHPARKVRDVYWKIYNSLYIGGQDALVAGYPRIMNDPKNQYVRYELDYIL

SEQ ID NO: 681 - protein, 267 aa, Phyllotreta atra
MSKVNEVADLYKQLKSEWNTKNPNLSKCEKLLSQLKLELTNLMFLPTSTATATKQELLLARDVLEIGVQWSVAANDITAFERYMAQLKCYYFDYNNQLPESAFKYQLLGLNLLFLLSLNRVAEFHTELELLPADHIQNDVYIRHPLSIEQYLMEGSYNKIFLAKGNVPAASYTFFMDILLDTIRVEIADCLSVAYEKISVKDFTRMLYLPNEEAAKTFAKKAFQNKAWKIDHDYFYFIPEQKTHEPIPSKELAQQAIEYAKELEMIV

SEQ ID NO: 682 - protein, 144 aa, Phyllotreta atra
MGRMHAPGKGIAQSALPYRSSVPTWLKVTPEEVKEHIFKLGKKGLTPSQIGVILRDSYGGAQVSFVSGNNILRIMKAMGLAPDLPEDLYYLIKKAVAIRKHLERNRKDKDSKFRLILVESRIHRLARYYKTKTVLAPNWKYDSR

SEQ ID NO: 683 - protein, 231 aa, Phyllotreta atra
MFTTRQVGKTLVNRTQGTRIASEGLKFRVFEVSLADLQNDNDAERSFRKFRLIAEDVQGRNVLTNFHGMDLTTDKLRSMVKKWQTLIEASADVKTSDGFLLRVFCIGFTNKDQHSQRKTCYAQHTQVRAIRKKMVEIITRDIQGSDIKEVVNKLLPDSIAKDIEKACQGIYPLHDVYIRKVKVLKKPRFDLSKLLELHGDGGKGGAGEAGGEGGSKVDRPEGYEPPVQETV

SEQ ID NO: 684 - protein, 276 aa, Phyllotreta atra
MSYVLCPEKQEPGFSFENCKRNALLESKGFTTPKAIKTGTTIVGIVYKDGVILGADTRATEDTTVADKNCEKIHFLAPNMYCCGAGTAADTEMTTQMVAAQLELHKLYTNREARVATANQLLKQYLFSYQGYIGAALILGGVDIEGPHLHMIYPHGSSVDLPYATMGSGSLAAISVFELGWKPEMGEEEGIQLVRNAIAAGIFNDLGSGSNVDVCIIRKGVVDYRRTYDEANKKGVRQGSYKFPRGATAVLSTKVVDVEEVSVTPIEAERMDVAAF

SEQ ID NO: 685 - protein, 191 aa, Phyllotreta atra
MAPVAKPKESKDKRDVKDKTKNHMRELHIRKLCLNICVGESGDRLTRAAKVLEQLTGQQPVFSKARYTVRSFGIRRNEKIAVHCTVRGAKAEEILERGLKVREYELRRDNFSISGNFGFGIQEHIDLGIKYDPSIGIYGLDFYVVLGRPGFNVAHRRAKKGKVGFSHRLTKEDAMKWFQQKYDGIILASKK

SEQ ID NO: 686 - protein, 152 aa, Phyllotreta atra
MALVIPEKFQHILRILGTNIDGKRKVQFALTAIKGVGRRYSNIVLKKADVNLDKRAGECSDEEVEKIITIMSNPRQYKIPDWFLNRPKDIIDGKYSQLTSSSLDSKLREDLERLKKIRAHRGMRHYWGLRVRGQHTKATGRRGRTVGVSKKK

SEQ ID NO: 687 - protein, 291 aa, Phyllotreta atra
MSSNAQKAQQLIAEAEKKVSSRGFFGSLFGGSSRIEDAVECYQRAANLFKMAKNWDAAGKAFCEAANLHSRSGARHDAATNFVDAANCYKKADISEAVNCLLKAIEIYTDMGKFTMAAKYHQNIAEMYETDPVDLERAVQHYEQAADYFRGEESNSSANKCLLKVGQYAAQLENYEKAIQIYQEVAFSALESSLLKYSAKEYLFRAALCHLCVDILNAQHAVESYIQRYPAFQDSREYKLLKTLMEHIEEQNVDGYTDAVNDYDSISRLDPWYTTILLRIKKQLNESPDLR

SEQ ID NO: 688 - protein, 123 aa, Phyllotreta atra; identical to SEQ ID NO: 620

SEQ ID NO: 689 - protein, 117 aa, Phyllotreta atra
MASHQSHGVQQLLAAEKRAADKVTEARKRKARRLKQAKEEAQDEIEKYRKERERQFREFEAKHMGSKEDVAAKIDQDTKRRIEDMNKAIQSQKEPVIRNILELVYDIKPEIHKNYRQ

SEQ ID NO: 690 - protein, 126 aa, Phyllotreta atra
MAGRGKGGKAKSGGKAKSRSSRAGLQFPVGRLHRLLRKGHYAERVGAGAPVYLAAVLEYLAAEVLELAGNAARDNKKTRINPRHLQLAVRNDEELNKLMAGVTIAQGGVLPNINAVLLPKKTGAEA

SEQ ID NO: 691 - protein, 1895 aa, Phyllotreta atra
MAATDSKAPLRTVKRVQFGILSPDEIRRMSVTEGGIRFPETMEAGRPKICGLMDPRQGVIDRSSRCQTCAGNMTECPGHFGHVDLAKPVFHIGFITKTIKILRCVCFFCSKLLVSPNNPKIKEIVMKTKGQPRKRLTFVYDLCKGKNICEGGDEMDVGKEGDESKKAGHGGCGRYQPNIRRIGLDLTAEWKHVNEDTQEKKIALSAERVWEILKHITDEECFILGMDPKFARPDWMIVTVLPVPPLSVRPAVVMYGSARNQDDLTHKLADIIKSNNELQKNEAAGAAAHIITENIKMLQFHVATLVDNDMPGMPRAMQKSGKPLKAIKARLKGKEGRIRGNLMGKRVDFSARTVITPDPNLRIDQVGIPRSIAQNMTFPEIVTPFNFDKMLELVQRGNSQYPGAKYIIRDNGERIDLRFHPKPSDLHLQWGYKVERHIRDGDLVIFNRQPTLHKMSMMGHRVKVLPWSTFRMNLSCTSPYNADFDGDEMNLHVPQSMETRAEVENIHITPRQIITPQANKPVMGIVQDTLTAVRKMTKRDVFIEKEQMMNLLMFLPIWDGKMPRPAILKPKPLWTGKQLFSLIIPGNVNMIRTHSTHPDEEDDGPYKWISPGDTKVMVEHGELVMGILCKKTLGTSAGSLLHICILELGHEVCGRFYGNIQTVINNWLLLEGHSIGIGDAIADPQTYTEIRRAIKKAKEDVIEVIQKAHNMELEPTPGNTLRQTFENQVNRILNDARDKTGGSAKKSLTDYNNLKAMVVSGSKGSNINISQVIACVGQQNVEGKRIPFGFRKRTLPHFIKDDYGPESRGFVENSYLAGLTPSEFYFHAMGGREGLIDTAVKTAETGYIQRRLIKAMESVMVHYDGTVRNSVGQLIQLRYGEDGLCGEMVEFQTLSTVKLSNKAFERKFRFDPSNERYLRRVFNEEVIKQLMGSGEVISELEREWDQLQKDREALRQIFPSGESKVVLPCNLQRMIWNVQKIFHINKRAPTDLSPLRVIQGVRELLKKCIIVAGEDRLSKQANENATLLFQCLVRSTLCTKCVSEEFRLSTEAFEWLIGEIETRFQQAQVNPGEMVGALAAQSLGEPATQMTLNTFHFAGVSSKNVTLGVPRLKEIINISKKPKAPSLTVFLTGVAARDAEKAKNVLCRLEHTTLRKVTANTAIYYDPDPQNTVIPEDQEFVNVYYEMPDFDPTRISPWLLRIELDRKRMTDKKLTMEQIAEKINAGFGDDLNCIFNDDNAEKLVLRIRIMNSDDEKFGEDEDVDKMDDDMFLRCIEANMLSDMTLQGIEAISKVYMHLPQTDAKKRIVITDTGEFKAIAEWLLETDGTSMMKVLSERDVDPVRTFSNDICEIFSVLGIEAVRKSVEKEMNAVLQFYGLYVNYRHLALLCDVMTAKGHLMAITRHGINRQDTGALMRCSFEETVDVLMDASSHAEVDPMRGVSENIILGQLPRMGTGCFDLLLDADKCKMGIPIPQAHSSDLMTSGMFFGSAATPSSMSPGGAMTPWANANTPYVGSEWSPQNMMGSGMTPGGAAFSPSAASDASGMSPAYGAWSPTPQSPAMSPYMASPHGQSPSYSPSSPAFIPTSPSMTPTSPGYSPSSPGYSPTSPNYSPTSPSYSPTSPSYSPTSPSYSPTSPSYSPTSPSYSPTSPSYSPTSPSYSPTSPSYSPTSPSYSPTSPSYSPTSPSYSPTSPNYSPTSPNYSPTSPSYSSTSPSYSPTSPSYSPSSPSYSPSSPRYTPASPNYSPTSPSYSPSSPQYSSASPSYSPSSPKYSPTSPSYSPTSPSFAGGSPQYSPTSPSYSPTSPSYSPSSPQHTPAGSSRYSPSSPNYSPSSPSYSPTSPQYSPRSTKYSPTSPTYTPTSPSYSPASPAYSPQPPRYSPSSPSYSPTSPGQDND

SEQ ID NO: 692 - protein, 159 aa, Phyllotreta atra
MKAKGELKEYEVIGRKLPTEKEPKTPLYKMRIFAPDQIVAKSRFWYFLRQLKKFKKATGEIVSVKPIPEKTPTKIKNFGIWVRYDSRSGTHNMYREYRDLSVSGAVTQCYRDMGARHRARAHSIQIIKVEQVKASDTRRPHVKQFHDSRIRFPLPKRIQ

SEQ ID NO: 693 - protein, 135 aa, Phyllotreta atra
MGKIMKSGKVVLVLGGRYAGKKAVVIKTCDDGTSDKQYGHALVAGIDRYPRKIHKRMGKGKMHKRSKIKPFIKVLNYNHLMPTRYSVDLASDLKVTAKDLKDPMKRKKARFQTRVKFEERYKQGKNKWFFQKLRF

SEQ ID NO: 694 - protein, 134 aa, Phyllotreta atra; identical to SEQ ID NO: 660

SEQ ID NO: 695 - protein, 139 aa, Phyllotreta atra; identical to SEQ ID NO: 627

SEQ ID NO: 696 - protein, 687 aa, Phyllotreta atra
MSYKRKADSQIPAEESDQLIIRPLGAGQEVGRSCIMIEFKGKKIMLDCGIHPGLSGMDALPFVDLIEADEIDILLISHFHLDHSGALPWFLLKTSFKGRCFMTHATKAIYRWLLSDYIKVSNIATEQMLYTEADLEASMDKIETINFHEEKDVLGVKFWAYNAGHVLGAAMFMIEIAGVKILYTGDFSRQEDRHLMAAEIPTIHPDVLITESTYGTHIHEKREDRETRFTTLVNDIVNRGGRCLIPVFALGRAQELLLILDEYWSQHPELHDIPIYYASSLAKKCMAVYQTYINAMNDKIKRQIAINNPFVFKHISNLKGIDHFDDIGPCVVMASPGMMQSGLSRELFETWCTDAKNGVIIAGYCVEGTLAKTILSEPEEITTMVGQKLPLKMSVDYISFSAHTDYQQTSEFIRMLKPPHLVLVHGEQNEMSRLKAALQREYEDDNTTSINIYNPRNTHSVELYFRGEKTAKVMGQLAVDEPQTGKTLNGILVKRNFNYHVLSPDDLPKYTDLNISQILQRQSLHYSGNSGVLRYMISQVAGLLESIDGEKKMRAFNAVDIIIENKIVVLEWVANPVNDMYADAIVAAILQADLLEVPIKNVTTSVKMDRMHFKECLIEMLQDMFGEDSVPKIFKGEKLYVAVNDKRADIDLNNLDVKCPEDETFQQIVQTAVTKLYQSLAPPQFES

SEQ ID NO: 697 - protein, 1329 aa, Phyllotreta atra
MDNIPRTHEDIEAQIREIQSKKKEAAPSESPPEKVAKLGEGGYFDSDIYEGKGKYEGYVTSIAANDEVDDEEEDVGYTHKRPGLGAPVALLNDVAQSDKDYDPFADRRRPTIADREDEYRQKRRRMIISPERVDPFADGGKTPDVQARNYSKIMKEQMLKGEELELRKKIIEKSKDGSLKATNGDATKSAAPKKRGRWDQTVDDAVVPQKKKTLSVSTSSSAATPVWEGDKTPADIRWDETPGHKGSETPGATPGQSTRMWDATPGPATPGRETPGHSGDKSTSRRNRWDETPKTERETPGHSSGWAETPRTDRIGADLIQETPTPGASKRRSRWDETPSATPSQAMTPGAMTPSTPHGTPHATPTHGHATPLMTPGGSTPVGAKAMSMATPTPGHLASMTPEQLQAYRWEREIDERNRPYSDDELDSMFPPGYKILPPPAGYVPIRTPARKLTATPTPLVGGTPQGFFIQQEDKSAKYMDNQPKGQNLPFMKPEDAQYFDKLLVDVDEDALAPEEQKERKIMKLLLKIKNGTPPMRKAALRQITDKAREFGAGPLFNQILPLLMSPTLEDQERHLLVKVIDRILYKLDDLVRPYVHKILVVIEPLLIDEDYYARVEGREIISNLAKAAGLATMISTMRPDIDNIDEYVRNTTARAFAVVASALGIPSLLPFLKAVCRSKKSWQARHTGIKIVQQIAILMGCAILPHLKSLVEIIEHGLVDEQQKVRTITALGIAALAEAATPYGIESFDSVLKPLWKGIRTHRGKGLAAFLKAIGYLIPLMDSEYANYYTREVMLILIREFQSPDEEMKKIVLKVVKQCCSTDGVESQYIKEEILPQFFKHFWNHRMALDRRNYRQLVDTTVEIANKVGASEIINRIVDDLKDENEAYRKMVMESIEKIMGNLGAADVDSRLEEQLIDGILYAFQEQTTEDVVMLNGFGTIVNQLGKRVKPYLPQICGTILWRLNNKSAKVRQQAADLISRIAVVMKTCQEEKLMGHLGVVLYEYLGEEYPEVLGSILGALKAIVNVIGMTKMTPPIKDLLPRLTPILKNRHEKVQENCIDLVGRIADRGPEYVSAREWMRICFELLELLKAHKKAIRRATVNTFGYIAKAIGPHDVLATLLNNLKVQERQNRVCTTVAIAIVAETCSPFTVLPALMNEYRVPELNVQNGVLKSLSFLFEYIGEMGKDYIYAVAPLLEDALMDRDLVHRQTACAAIKHMSLGVYGFGCEDALVHLLNYVWPNIFETSPHLVQAFMDAIEGMRVALGPVKILQYTLQGLFHPARKVRDVYWKIYNSLYIGGQDALVAGYPRIMNDPKNQYVRYELDYIL

SEQ ID NO: 698 - protein, 267 aa, Phyllotreta cruciferae
MSKVNEVADLYKQLKSEWNTKNPNLSKCEKLLSQLKLELTNLMFLPTSTATATKQELLLARDVLEIGVQWSVAANDITAFERYMAQLKCYYFDYNNQLPESAFKYQLLGLNLLFLLSLNRVAEFHTELELLPADHIQNDVYIRHPLSIEQYLMEGSYNKIFLAKGNVPAASYTFFMDILLDTIRVEIADCLSVAYEKISVKDFTRMLYLPNEEAAKTFAKKAFQNKAWKLDHDYFYFIPEQKTHEPIPSKELAQQAIEYAKELEMIV

SEQ ID NO: 699 - protein, 151 aa, Phyllotreta cruciferae
MGRMHAPGKGIAQSALPYRRSVPTWLKVTPEEVKEHIFKLGKKGLTPSQIGVILRDSYGVAQVRFVSGNKILRIMKAMGLAPDLPEDLYYLIKKAVAIRKHLERNRKDKDSKFRLILVESRIHRLARYYKTKTVLAPNWKYESSTASALVA

SEQ ID NO: 700 - protein, 268 aa, Phyllotreta cruciferae
MAVGKNKGLSKGGKKGVKKKVIDPFTRKDWYDVKAPSMFTTRQVGKTLVNRTQGTRIASEGLKFRVFEVSLADLQNDNDAERSFRKFRLIAEDVQGRNVLTNFHGMDLTTDKLRSMVKKWQTLIEASADVKTSDGFLLRVFCIGFTNKDQHSQRKTCYAQHTQVRAIRKKMVEIITRDIQGSDIKEVVNKLLPDSIAKDIEKACQGIYPLHDVYIRKVKVLKKPRFDLSKLLELHGDGGKGGAGEAGGEGGSKVDRPEGYEPPVQESV

SEQ ID NO: 701 - protein, 276 aa, Phyllotreta cruciferae; identical to SEQ ID NO: 684

SEQ ID NO: 702 - protein, 168 aa, Phyllotreta cruciferae
MRELHIRGLCLNICVGESGDRLTRAAKVLEQLTGQQPVFSKARYTVRSFGIRRNEKIAVHCTVRGAKAEEILERGLKVREYELRRDNFSISGNFGFGIQEHIDLGIKYDPSIGIYGLDFYVVLGRPGFNVAHRRAKKGKVGFSHRLTKEDAMKWFQQKYDGIILASKK

SEQ ID NO: 703 - protein, 152 aa, Phyllotreta cruciferae
MSLVIPEKFQHILRVVGTNIDGNRKVMFALTAIKGVGRRYANIVLKKADIDLDKRAGECSEEEVEKIVTIMTNPRQYKIPDWFLNRQKDIVDGKYSQLTSSNLDSKLREDLERMKKIRAHRGLRHYWGLRVRGQHTKTTGRRGRTVGVSKKK

SEQ ID NO: 704 - protein, 291 aa, Phyllotreta cruciferae; identical to SEQ ID NO: 670

SEQ ID NO: 705 - protein, 123 aa, Phyllotreta cruciferae; identical to SEQ ID NO: 620

SEQ ID NO: 706 - protein, 117 aa, Phyllotreta cruciferae
MASHQSHGVQQLLAAEKRAADKVTEARKRKARRLKQAKEEAQDEIEKYRKERERQFREFEAKHMGSKEDVASKIDQDTKRRIEDMNKAIQSQKEPVIRNILELVYDIKPEIHKNYRQ

SEQ ID NO: 707 - protein, 124 aa, Phyllotreta cruciferae; identical to SEQ ID NO: 622

SEQ ID NO: 708 - protein, 1516 aa, Phyllotreta cruciferae
MKTIKILRCVCFFCSKLLVSPNNPKIKEIVMKTKGQPRKRLTFVYDLCKGKNSCEGGDEMDVGKEGDESKKAGHGGCGRYQPNIRRIGLDLTAEWKHVNEDTQEKKIALSAERVWEILKHITDEECFILGMDPKFARPDWMIVTVLPVPPLSVRPAVVMYGSARNQDDLTHKLADIIKSNNELQKNEAAGAAAHIITENIKMLQFHVATLVDNDMPGMPRAMQKSGKPLKAIKARLKGKEGRIRGNLMGKRVDFSARTVITPDPNLRIDQVGIPRSIAQNMTFPEIVTPFNFDKMLELVQRGNSQYPGAKYIIRDNGERIDLRFHPKPSDLHLQWGYKVERHIRDGDLVIFNRQPTLHKMSMMGHRVKVLPWSTFRMNLSCTSPYNADFDGDEMNLHVPQSMETRAEVENIHITPRQIITPQANKPVMGIVQDTLTAVRKMTKRDVFIEKEQMMNLLMFLPIWDGKMPRPAILKPKPLWTGKQLFSLIIPGNVNMIRTHSTHPDDEDDGPYKWISPGDTKVMVEHGELVMGILCKKTLGTSAGSLLHICILELGHEVCGRFYGNIQTVINNWLLLEGHSIGIGDAIADPQTYTEIRRAIKKAKEDVIEVIQKAHNMELEPTPGNTLRQTFENQVNRILNDARDKTGGSAKKSLTDYNNLKAMVVSGSKGSNINISQVIACVGQQNVEGKRIPFGFRKRTLPHFIKDDYGPESRGFVENSYLAGLTPSEFYFHAMGGREGLIDTAVKTAETGYIQRRLIKAMESVMVHYDGTVRNSVGQLIQLRYGEDGLCGEMVEFQTLSTVKLSNKAFERKFRFDPSNERYLRRVFNEEVIKQLMGSGEVISELEREWDQLQKDREALRQIFPSGESKVVLPCNLQRMIWNVQKIFHINKRAPTDLSPLRVIQGVRELLKKCIIVAGEDRLSKQANENATLLFQCLVRSTLCTKCVSEEFRLSTEAFEWLIGEIETRFQQAQVNPGEMVGALAAQSLGEPATQMTLNTFHFAGVSSKNVTLGVPRLKEIINISKKPKAPSLTVFLTGVAARDAEKAKNVLCRLEHTTLRKVTANTAIYYDPDPQNTVIPEDQEFVNVYYEMPDFDPTRISPWLLRIELDRKRMTDKKLTMEQIAEKINAGFGDDLNCIFNDDNAEKLVLRIRIMNSDDEKFGEDEDVDKMDDDMFLRCIEANMLSDMTLQGIEAISKVYMHLPQTDSKKRIVITDTGEFKAIAEWLLETDGTSMMKVLSERDVDPVRTFSNDICEIFSVLGIEAVRKSVEKEMNAVLQFYGLYVNYRHLALLCDVMTAKGHLMAITRHGINRQDTGALMRCSFEETVDVLMDASSHAEVDPMRGVSENIILGQLPRMGTGCFDLLLDADKCKMGIPIPQAHSSDLMTSGMFFGSAATPSSMSPGGAMTPWANANTPYVGSEWSPQNMMGSGMTPGGAAFSPSAASDASGMSPAYGAWSPTPQSPRSRRADPNGRRRKSSKKTMKKKRWWKQSASPISHPSSSRCSCRCNRERERI

SEQ ID NO: 709 - protein, 176 aa, Phyllotreta cruciferae
MKAKGELKEYEVIGRKLPTDKEKSPPLYKMRIFSPDPIVAKSRFWYFLRQLRKFKKTTGEIVSVKLVPEKTPTKIKNFGIWLRYDSRSGTHNMYREYRDLSVSGAVTACYRDMGARHRARAHAIQIIKVEQVKSSDTRRPQVKQFHDSRIRFPLPKRIQHKSMNRFSVRKPRTYFL

SEQ ID NO: 710 - protein, 135 aa, Phyllotreta cruciferae; identical to SEQ ID NO: 693

SEQ ID NO: 711 - protein, 134 aa, Phyllotreta cruciferae
MAIRPVYRPTIIKKRTKKFIRHQSDRYDKLKRNWRKPKGIDNRVRRRFKGQYLMPNIGYGSNKKTRHMLPTGFRKVLVHNVKELEVLMMQNRKFCAEIAHAVSSKKRKEIVERAQQLSIRVTNATARLRSEENE

SEQ ID NO: 712 - protein, 139 aa, Phyllotreta cruciferae; identical to SEQ ID NO: 627

SEQ ID NO: 713 - protein, 652 aa, Phyllotreta cruciferae
MIEFKGKKIMLDCGIHPGLSGMDALPFVDLIEADEIDILLISHFHLDHSGALPWFLLKTSFKGRCFMTHATKAIYRWLLSDYIKVSNIATEQMLYTEADLEASMDKIETINFHEEKDVLGVKFWAYNAGHVLGAAMFMIEIAGVKILYTGDFSRQEDRHLMAAEIPTIHPDVLITESTYGTHIHEKREDRETRFTTLVNDIVNRGGRCLIPVFALGRAQELLLILDEYWSQHPELHDIPIYYASSLAKKCMAVYQTYINAMNDKIKRQIAINNPFVFKHISNLKGIDHFDDIGPCVVMASPGMMQSGLSRELFETWCTDAKNGVIIAGYCVEGTLAKTILSEPEEITTMVGQKLPLKMSVDYISFSAHTDYQQTSEFIRMLKPPHLVLVHGEQNEMNRLKAALQREYEDDNTTSINIYNPRNTHSVELYFRGEKTAKVMGQLAVDEPQTGKTLNGILVKRNFNYHVLSPDDLPKYTDLNISQILQRQSLHYSGNSGVLRYMISQVAGLLESIDGEKKMRAFNAVDIIIENKIVVLEWVANPVNDMYADAIVAAILQADLLEVPIKNVTTSVKMDRMHFKECLIEMLQDMFGEDSVPKIFKGEKLYVAVNDKRADIDLNNLDVKCPEDETFQQIVQTAVTKLYQSLAPPQFES

SEQ ID NO: 714 - protein, 1329 aa, Phyllotreta cruciferae; identical to SEQ ID NO: 697

1. An interfering ribonucleic acid (RNA) molecule wherein the RNA comprises at least one dsRNA wherein the dsRNA is a region of double-stranded RNA comprising annealed complementary strands, one strand of which comprises a sequence of at least 19 contiguous nucleotides which is at least partially complementary to a target nucleotide sequence within a flea beetle target gene, and (i) is at least 85% identical to at least a 19 contiguous nucleotide fragment of SEQ ID NO: 409-612, or the complement thereof, (ii) comprises at least a 19 contiguous nucleotide fragment of SEQ ID NO: 409-612, or the complement thereof, (iii) comprises at least a 19 contiguous nucleotide fragment of a nucleotide sequence encoding an amino acid sequence encoded by SEQ ID NO: 409-612, or the complement thereof, or (iv) can hybridize under stringent conditions to a polynucleotide comprising the nucleotide sequence of SEQ ID NO: 409-612, or the complements thereof, wherein the interfering RNA molecule has insecticidal activity on an insect pest, wherein the insect pest is a flea beetle of the Alticini tribe.

2. The interfering RNA molecule of claim 1, wherein the interfering RNA molecule comprises SEQ ID NO: 409-612, or the complement thereof.

3. An interfering RNA molecule of claim 1, wherein the dsRNA is a region of double-stranded RNA comprising substantially complementary annealed strands.

4. An interfering RNA molecule of claim 1, wherein the dsRNA is a region of double-stranded RNA comprising fully complementary annealed strands.

5. An interfering RNA molecule of claim 1, wherein the insect pest is a flea beetle selected from the group consisting of Phyllotreta armoraciae (horseradish flea beetle), Phyllotreta cruciferae (canola flea beetle), Phyllotreta pusilla (western black flea beetle), Phyllotreta nemorum (striped turnip flea beetle), Phyllotreta atra (turnip flea beetle), Phyllotreta robusta (garden flea beetle), Phyllotreta striolata (striped flea beetle), Phyllotreta undulata, Psylliodes chrysocephala, and Psylliodes punctulata (hop flea beetle).

6. A nucleic acid construct comprising the interfering RNA molecule of claim 1.

7. A recombinant vector comprising a regulatory sequence operably linked to a nucleotide sequence that encodes the interfering RNA molecule of claim 1.

8. A composition comprising two or more of the interfering RNA molecules of claim 1.

9. An insecticidal composition for inhibiting the expression of a flea beetle target gene, comprising the interfering RNA of claim 1 and an agriculturally acceptable carrier.

10. An insecticidal composition of claim 9 comprising at least a second insecticidal agent for controlling a flea beetle.

11. An insecticidal composition of claim 10 wherein the second insecticidal agent is or is derived from a Bacillus cereus insecticidal protein, a Xenorhabdus spp. insecticidal protein, a Photorhabdus spp. insecticidal protein, a Brevibacillus laterosporous insecticidal protein, a Lysinibacillus sphearicus insecticidal protein, a Chromobacterium spp. insecticidal protein, a Yersinia entomophaga insecticidal protein, a Paenibacillus popiliae insecticidal protein, or a Clostridium spp. insecticidal protein.

12. A transgenic plant, or part thereof, comprising the interfering RNA molecule, the nucleic acid molecule, the nucleic acid construct, and/or the composition of any of the respective preceding claims, wherein the transgenic plant has enhanced resistance to a flea beetle as compared to a control plant.

13. Transgenic seed of a transgenic plant of claim 12.

14. (canceled)

15. (canceled)

16. A method of controlling a flea beetle comprising contacting the flea beetle with a nucleic acid molecule that is or is capable of producing an interfering RNA molecule of claim 1 for inhibiting expression of a target gene in the flea beetle thereby controlling the flea beetle.

17. A method of controlling a flea beetle comprising contacting the flea beetle with a nucleic acid molecule that is or is capable of producing the interfering RNA molecule of claim 1 for inhibiting expression of a target gene in the flea beetle, and contacting the flea beetle with at least a second insecticidal agent for controlling the flea beetle, thereby controlling the flea beetle, wherein said second insecticidal agent comprises a B. thuringiensis insecticidal protein.
